United States Patent Application Publication US 2026/0375159 A1 - sequence listing, part 4

SEQ ID NO: 11795 - DNA, 5279 bp, synthetic construct
  source 1..5279: mol_type = other DNA
gaaataagagagaaaagaagagtaagaagaaatataagagaattcgccaccatggcccctaagaaaaagcggaaggtgaatatcagcggctctagctgcggcagccccaacagcgccgacaccagcagcgacttcaaggacctgtggaccaagctgaaggaatgccacgaccgggaagtgcagggactccaggtgaaggtcaccaaactcaagcaagaaagaatcctggacgcccagagactggaagaattcttcaccaagaaccagcagctgagagagcagcagaaagtgctgcacgagacaatcaaggttctggaagatagactgcgggccggcctgtgcgacagatgcgccgtgaccgaggaacacatgcgcaaaaagcagcaggagttcgagaacattagacagcaaaatctgaaattgatcacagagctgatgaacgagagaaacacactgcaggaggagaacaagaagctgagcgagcagctgcaacagaagatcgagaatgatcagcaacaccaggccgctgagctggaatgtgaagaggacgtgatccccgacagcccaatcacagctttcagcttttctggcgtgaacagactgaggcggaaggaaaacccccacgtgcggtacatcgagcagacccataccaagctggaacacagcgtgtgtgccaacgagatgagaaaggtgtccaagtcctccacccatccccagcacaaccctaacgaaaatgagatcctggtggctgatacctacgaccagtctcagagccctatggccaaggcccacggcaccagctcttatacccctgataagagctccttcaacctggccaccgtggtggccgagacactgggcctgggcgtgcaggaggaaagcgagacacagggcccaatgagccctctgggagatgagctgtaccactgcctggaaggcaaccacaagaaacagccttttgagtccggctccgagactcctggaacaagcgagagcgctacacctgagggcagctatgaacaacttgcaccacaaccgtgtgtgggagaaactttacattctagcctcccacgagacagtgaactgtttgtgcctgaagaggggagcagcgagaaggagagcgaggacgcgccaaaaacatctcctccgacgcctgggaaacatggtttggaacagactggggaggaaaaagtgatggtgactgttcctgacaaaaatccaccttgtccttgctgtggtacccgggtaaactctgtgttgaatctgattgaacatctgaaagtgtcacacgggaaaaggggggtttgttttcggtgtgcaaaatgtggaaaggaaaatagtaactatcacagtgttgtttgtcattttaagaaatgcaggggtccagagacggagaaagccccagctggggagtggatttgtgaggtatgcaacagagattttacaaccaaaattggcctgggacaacacaagagattggcacacccagcagtgagaaatcaggaaaggatcgttgcttcccaaccgaaagaaacatcaaatagaggtgctcacaaaaggtgctggacaaaggaggaggaagaattactaataagactggaggctcagttcgagggaaacaaaaatattaataagcttattgcagaacacataaccaccaaaacagctaagcagatcagtgacaaaaggcgattgctgtccagaaagccagcagaggagccacgtgaggagcctggaacgtgtcatcacaccaggagagcagctgcgagcctgagaacggagcctgagatgagtcatcacgcccaggcagaggacagagataatggacctgggagacgccctctgccaggcagggcagctgccggagggagaacaatggacgagataagacgccaccctgataagggcaacggacagcagagacccaccaagcaaaaatcagaagaacagctgcaggcttactataaaaagacactagaggaacgactttcagctggggcacttaacaccttcccccgagcattcaagcaggtaatggaaggccgggatataaagctagtaatcaatcagacagcgcaggactgcttcggatgcctggaatccataagccaaataagaacggcaacccgagataaaaaggacacggtgacccgggagaaacacccaaagaaaccttttcagaagtggatgaagaagagagcaatcaaaaaaggtaattatcttcggttccagcgtttattttatcttgatagagggaaactggctaaaatcattttagatgatattgaatgcttgtcttgtgacatccctcttagcgagatctacagcgttttcaagaccagatgggagaccaccggcagcttcaagagcctgggcgacttcaagacatacggcaaggccgacaacaccgccttcagagagctcatcaccgccaaggagatcgagaagaatgtgcaggagatgagcaagggctccgcgccagggcccgatggaattacattaggcgatgtggtgaagatggaccccgagttcagcagaaccatggagatcttcaacctgtggctcaccaccgggaagatccccgacatggttagaggctgcagaaccgttctcatccccaagagcagcaagcccgacagactgaaggacatcaacaactggagacccatcaccatcggcagcatcctgctgagactgttctccagaatcgtgaccgccagactgtccaaggcctgccctctgaaccctagacagagaggcttcatcagagctgccggctgcagcgagaacctgaagcttctgcagaccatcatctggagcgccaagagagagcacagacccctgggcgttgtgttcgtggacatcgccaaggctttcgacactgtgagccaccagcacatcatccacgccctgcaacagcgagaggtcgaccctcacatcgtgggccttgtgagcaacatgtacgagaacatcagcacctacatcaccaccaagagaaacacccacaccgacaagatccagatacgtgtgggcgtcaagcagggcgaccctatgagccctcttctgttcaacctcgccatggaccctctgctgtgcaagctggaggagtctggcaagggataccacagaggccagagctcgattactgccatggccttcgccgacgacctggtgcttctgagcgattcttgggagaacatgaacaccaacatctccatcctcgagaccttctgcaacctcaccggcctgaaaacccagggccaaaagtgccacggcttctacatcaagcccaccaaggacagctacaccatcaacgactgcgctgcctggaccatcaatggcacccctctcaacatgatcgaccccggcgagagcgagaagtacctgggcttacagttcgacccttggatcggcatcgccagaagcggccttagcacaaagttggacttctggctccagagaatcgaccaggcccccctgaagcctcttcagaaaaccgacatcctgaaaacctacacaatccccagactcatctacatcgccgaccacagcgaggtcaagagcgcactactcgaaacccttgaccagaagatccggacagcggtcaaggaatggcttcacctacctccgtgcacctgcgatgccatcctgtactcgagcacgagagacggcggtttgggcatcaccaaattggcaggactgatccccagcgtgcaggcccgtagactgcatcggatcgcacagtcatctgacgatacgatgaaatgcttcatggaaaaagagaaaatggaacagctgcataagaaattgtggattcaagctggaggggacagagagaacataccctcgatttgggaagcaccaccgtcgagtgaaccaccaaacaacgtgagcacaaattcggaatgggaagcaccgacccagaaagataaatttccaaagccttgcaattggaggaaaaacgaattcaaaaaatggaccaaattggcatcccaaggccgcggaattgtaaattttgaaagagacaaaattagtaaccattggatccaatactacagacgcatacctcacaggaaactcctcactgcactacaactcagggccaacgtttaccccacgagagaatttctagccaggggtagacaagaccaatacatcaaggcgtgtaggcactgcgatgcggacaacgaatcctgcgcccacatcatcggcaactgcccagtgacacaggacgcccgaatcaagaggcacaattacatctgcgaactgcttctcgaggaggcgaagaagaaggactgggtagtgttcaaggaaccgcacataagggattccaacaaggaactgtacaaacctgacctgatatttgtgaaggatgggcgtgcacttgtcgtggatgtgacagtacggtatgaagcagccaaatcatcgctggaggaagccgctgcagagaaagtgagaaagtacaaacacctggaaacggaagtaagacatctcacgaatgcaaaggacgttacttttgtgggctttcccctaggagcgcgggggaaatggcaccaagataactttaaacttttgactgagcttggcctctccaaatcgaggcaagtgaaaatggcagagactttttccacagtagcgctcttttcatctgtggacattgtacatatgtttgccagtagggccagaaaatctatggttatgtccggctccgagactcctggaacaagcgagagcgctacacctgagggaaaaggcgaccccaagaaacctagaggcaagatgagcagctacgcctttttcgtgcagacctgtcgggaagagcacaagaaaaagcaccctgacgccagcgtgaacttctctgagttcagcaagaagtgcagcgagagatggaaaacaatgtccgccaaggaaaagggcaagttcgaggacatggccaaggctgataaggccagatacgagcgggaaatgaaaacctacatcccacctaagggcgagggcggatctggcaaaagaaccgctgatggcagcgagttcgagagccccaagaaaaagagaaaggtgtgataataggctgccttctgcggggcttgccttctggccatgcccttcttctctcccttgcacctgtacctcttggtctttgaataaagcctgagtaggaaggaccggtaaaaaaaaaaaaaaaaaaaaaaaaaaaaaaacgttgactaaaaaaaaaaaaaaaaaaaaaaaaaaaaaaaaaaaaaaaaaaaaaaaaaaaaaaaaaaaaaaaaaaaaaa

SEQ ID NO: 11796 - DNA, 6323 bp, synthetic construct
  source 1..6323: mol_type = other DNA
gaaataagagagaaaagaagagtaagaagaaatataagagaattcgccaccatggcccctaagaaaaagcggaaggtggctatggcctccatcgaggataatcctgagatagaggacgacatcttcagaaagaagagactgacaatcatggacctgcaccccggcgccggcaagaccaagcggtacctgcctgctatcgtgcgggaggctattaagagaggactgagaacactgatcctggcccctacccgggtggtggccgcagagatggaagaggccctgagaggcctgcccatcagataccagaccccagccatcagagccgagcacacaggcagagagatcgttgacctgatgtgccacgccacatttaccatgcggctgctgagccctatccgcgtgcccaactacaacctgatcatcatggacgaggcccacttcaccgaccctgccagcatcgccgccagaggatacatcagcaccagagtggaaatgggcgaggccgccggcatctttatgaccgctacaccacctggatctagagatcctttcccccagtccaacgcccctatcatggatgaagaacgggaaatccccgagagatcctggaacagcggccacgagtgggtgacagatttcaagggcaaaaccgtgtggttcgtgcctagcatcaaagccggcaacgatatcgccgcttgtctgcggaaaaatggcaagaaagtgatccagctgagcagaaagacctttgatagcgagtacatcaagactcggaccaacgactgggacttcgtggtcacaaccgacatcagcgagatgggggccaacttcaaggccgagcgggtcatcgaccccagacggtgcatgaaacctgtgatcctcacagacggcgaggaaagagtgatcctggccggacctatgcctgtgacccacagctctgccgcccagagacgtggaagagtgggcagaaaccccaagaacgagaatgaccaatacatctacatgggcgagccactggaaaacgatgaggactgcgcccattggaaggaggccaagatgctgctggacaacattaacacccctgagggaatcatccccagcatgttcgagcctgaaagagagaaggtggatgccattgacggcgagtaccggctgcgcggcgaggccagaaagaccttcgtggacctgatgagacggggcgacctgcctgtttggctggcttacagagtggccgctgaaggcatcaactatgccgacagaagatggtgcttcgacggcgtgaagaacaaccagatcctggaagaaaatgtggaagtggaaatctggaccaaggaaggcgaaaggaagaagctgaagcctagatggcttgatgcccggatctattctgatcccctggctctgaaggaattcaaagagttcgccgccggcagaaagtccggctccgagactcctggaacaagcgagagcgctacacctgagggcagcaatatcagcggctctagctgcggcagccccaacagcgccgacaccagcagcgacttcaaggacctgtggaccaagctgaaggaatgccacgaccgggaagtgcagggactccaggtgaaggtcaccaaactcaagcaagaaagaatcctggacgcccagagactggaagaattcttcaccaagaaccagcagctgagagagcagcagaaagtgctgcacgagacaatcaaggttctggaagatagactgcgggccggcctgtgcgacagatgcgccgtgaccgaggaacacatgcgcaaaaagcagcaggagttcgagaacattagacagcaaaatctgaaattgatcacagagctgatgaacgagagaaacacactgcaggaggagaacaagaagctgagcgagcagctgcaacagaagatcgagaatgatcagcaacaccaggccgctgagctggaatgtgaagaggacgtgatccccgacagcccaatcacagctttcagcttttctggcgtgaacagactgaggcggaaggaaaacccccacgtgcggtacatcgagcagacccataccaagctggaacacagcgtgtgtgccaacgagatgagaaaggtgtccaagtcctccacccatccccagcacaaccctaacgaaaatgagatcctggtggctgatacctacgaccagtctcagagccctatggccaaggcccacggcaccagctcttatacccctgataagagctccttcaacctggccaccgtggtggccgagacactgggcctgggcgtgcaggaggaaagcgagacacagggcccaatgagccctctgggagatgagctgtaccactgcctggaaggcaaccacaagaaacagccttttgagtccggctccgagactcctggaacaagcgagagcgctacacctgagggcagctatgaacaacttgcaccacaaccgtgtgtgggagaaactttacattctagcctcccacgagacagtgaactgtttgtgcctgaagaggggagcagcgagaaggagagcgaggacgcgccaaaaacatctcctccgacgcctgggaaacatggtttggaacagactggggaggaaaaagtgatggtgactgttcctgacaaaaatccaccttgtccttgctgtggtacccgggtaaactctgtgttgaatctgattgaacatctgaaagtgtcacacgggaaaaggggggtttgttttcggtgtgcaaaatgtggaaaggaaaatagtaactatcacagtgttgtttgtcattttaagaaatgcaggggtccagagacggagaaagccccagctggggagtggatttgtgaggtatgcaacagagattttacaaccaaaattggcctgggacaacacaagagattggcacacccagcagtgagaaatcaggaaaggatcgttgcttcccaaccgaaagaaacatcaaatagaggtgctcacaaaaggtgctggacaaaggaggaggaagaattactaataagactggaggctcagttcgagggaaacaaaaatattaataagcttattgcagaacacataaccaccaaaacagctaagcagatcagtgacaaaaggcgattgctgtccagaaagccagcagaggagccacgtgaggagcctggaacgtgtcatcacaccaggagagcagctgcgagcctgagaacggagcctgagatgagtcatcacgcccaggcagaggacagagataatggacctgggagacgccctctgccaggcagggcagctgccggagggagaacaatggacgagataagacgccaccctgataagggcaacggacagcagagacccaccaagcaaaaatcagaagaacagctgcaggcttactataaaaagacactagaggaacgactttcagctggggcacttaacaccttcccccgagcattcaagcaggtaatggaaggccgggatataaagctagtaatcaatcagacagcgcaggactgcttcggatgcctggaatccataagccaaataagaacggcaacccgagataaaaaggacacggtgacccgggagaaacacccaaagaaaccttttcagaagtggatgaagaagagagcaatcaaaaaaggtaattatcttcggttccagcgtttattttatcttgatagagggaaactggctaaaatcattttagatgatattgaatgcttgtcttgtgacatccctcttagcgagatctacagcgttttcaagaccagatgggagaccaccggcagcttcaagagcctgggcgacttcaagacatacggcaaggccgacaacaccgccttcagagagctcatcaccgccaaggagatcgagaagaatgtgcaggagatgagcaagggctccgcgccagggcccgatggaattacattaggcgatgtggtgaagatggaccccgagttcagcagaaccatggagatcttcaacctgtggctcaccaccgggaagatccccgacatggttagaggctgcagaaccgttctcatccccaagagcagcaagcccgacagactgaaggacatcaacaactggagacccatcaccatcggcagcatcctgctgagactgttctccagaatcgtgaccgccagactgtccaaggcctgccctctgaaccctagacagagaggcttcatcagagctgccggctgcagcgagaacctgaagcttctgcagaccatcatctggagcgccaagagagagcacagacccctgggcgttgtgttcgtggacatcgccaaggctttcgacactgtgagccaccagcacatcatccacgccctgcaacagcgagaggtcgaccctcacatcgtgggccttgtgagcaacatgtacgagaacatcagcacctacatcaccaccaagagaaacacccacaccgacaagatccagatacgtgtgggcgtcaagcagggcgaccctatgagccctcttctgttcaacctcgccatggaccctctgctgtgcaagctggaggagtctggcaagggataccacagaggccagagctcgattactgccatggccttcgccgacgacctggtgcttctgagcgattcttgggagaacatgaacaccaacatctccatcctcgagaccttctgcaacctcaccggcctgaaaacccagggccaaaagtgccacggcttctacatcaagcccaccaaggacagctacaccatcaacgactgcgctgcctggaccatcaatggcacccctctcaacatgatcgaccccggcgagagcgagaagtacctgggcttacagttcgacccttggatcggcatcgccagaagcggccttagcacaaagttggacttctggctccagagaatcgaccaggcccccctgaagcctcttcagaaaaccgacatcctgaaaacctacacaatccccagactcatctacatcgccgaccacagcgaggtcaagagcgcactactcgaaacccttgaccagaagatccggacagcggtcaaggaatggcttcacctacctccgtgcacctgcgatgccatcctgtactcgagcacgagagacggcggtttgggcatcaccaaattggcaggactgatccccagcgtgcaggcccgtagactgcatcggatcgcacagtcatctgacgatacgatgaaatgcttcatggaaaaagagaaaatggaacagctgcataagaaattgtggattcaagctggaggggacagagagaacataccctcgatttgggaagcaccaccgtcgagtgaaccaccaaacaacgtgagcacaaattcggaatgggaagcaccgacccagaaagataaatttccaaagccttgcaattggaggaaaaacgaattcaaaaaatggaccaaattggcatcccaaggccgcggaattgtaaattttgaaagagacaaaattagtaaccattggatccaatactacagacgcatacctcacaggaaactcctcactgcactacaactcagggccaacgtttaccccacgagagaatttctagccaggggtagacaagaccaatacatcaaggcgtgtaggcactgcgatgcggacaacgaatcctgcgcccacatcatcggcaactgcccagtgacacaggacgcccgaatcaagaggcacaattacatctgcgaactgcttctcgaggaggcgaagaagaaggactgggtagtgttcaaggaaccgcacataagggattccaacaaggaactgtacaaacctgacctgatatttgtgaaggatgggcgtgcacttgtcgtggatgtgacagtacggtatgaagcagccaaatcatcgctggaggaagccgctgcagagaaagtgagaaagtacaaacacctggaaacggaagtaagacatctcacgaatgcaaaggacgttacttttgtgggctttcccctaggagcgcgggggaaatggcaccaagataactttaaacttttgactgagcttggcctctccaaatcgaggcaagtgaaaatggcagagactttttccacagtagcgctcttttcatctgtggacattgtacatatgtttgccagtagggccagaaaatctatggttatgtgataataggctgccttctgcggggcttgccttctggccatgcccttcttctctcccttgcacctgtacctcttggtctttgaataaagcctgagtaggaaggaccggtaaaaaaaaaaaaaaaaaaaaaaaaaaaaaaacgttgactaaaaaaaaaaaaaaaaaaaaaaaaaaaaaaaaaaaaaaaaaaaaaaaaaaaaaaaaaaaaaaaaaaaaaa

SEQ ID NO: 11797 - DNA, 6383 bp, synthetic construct
  source 1..6383: mol_type = other DNA
gaaataagagagaaaagaagagtaagaagaaatataagagaattcgccaccatggcccctaagaaaaagcggaaggtgaatatcagcggctctagctgcggcagccccaacagcgccgacaccagcagcgacttcaaggacctgtggaccaagctgaaggaatgccacgaccgggaagtgcagggactccaggtgaaggtcaccaaactcaagcaagaaagaatcctggacgcccagagactggaagaattcttcaccaagaaccagcagctgagagagcagcagaaagtgctgcacgagacaatcaaggttctggaagatagactgcgggccggcctgtgcgacagatgcgccgtgaccgaggaacacatgcgcaaaaagcagcaggagttcgagaacattagacagcaaaatctgaaattgatcacagagctgatgaacgagagaaacacactgcaggaggagaacaagaagctgagcgagcagctgcaacagaagatcgagaatgatcagcaacaccaggccgctgagctggaatgtgaagaggacgtgatccccgacagcccaatcacagctttcagcttttctggcgtgaacagactgaggcggaaggaaaacccccacgtgcggtacatcgagcagacccataccaagctggaacacagcgtgtgtgccaacgagatgagaaaggtgtccaagtcctccacccatccccagcacaaccctaacgaaaatgagatcctggtggctgatacctacgaccagtctcagagccctatggccaaggcccacggcaccagctcttatacccctgataagagctccttcaacctggccaccgtggtggccgagacactgggcctgggcgtgcaggaggaaagcgagacacagggcccaatgagccctctgggagatgagctgtaccactgcctggaaggcaaccacaagaaacagccttttgagtccggctccgagactcctggaacaagcgagagcgctacacctgagggcagctatgaacaacttgcaccacaaccgtgtgtgggagaaactttacattctagcctcccacgagacagtgaactgtttgtgcctgaagaggggagcagcgagaaggagagcgaggacgcgccaaaaacatctcctccgacgcctgggaaacatggtttggaacagactggggaggaaaaagtgatggtgactgttcctgacaaaaatccaccttgtccttgctgtggtacccgggtaaactctgtgttgaatctgattgaacatctgaaagtgtcacacgggaaaaggggggtttgttttcggtgtgcaaaatgtggaaaggaaaatagtaactatcacagtgttgtttgtcattttaagaaatgcaggggtccagagacggagaaagccccagctggggagtggatttgtgaggtatgcaacagagattttacaaccaaaattggcctgggacaacacaagagattggcacacccagcagtgagaaatcaggaaaggatcgttgcttcccaaccgaaagaaacatcaaatagaggtgctcacaaaaggtgctggacaaaggaggaggaagaattactaataagactggaggctcagttcgagggaaacaaaaatattaataagcttattgcagaacacataaccaccaaaacagctaagcagatcagtgacaaaaggcgattgctgtccagaaagccagcagaggagccacgtgaggagcctggaacgtgtcatcacaccaggagagcagctgcgagcctgagaacggagcctgagatgagtcatcacgcccaggcagaggacagagataatggacctgggagacgccctctgccaggcagggcagctgccggagggagaacaatggacgagataagacgccaccctgataagggcaacggacagcagagacccaccaagcaaaaatcagaagaacagctgcaggcttactataaaaagacactagaggaacgactttcagctggggcacttaacaccttcccccgagcattcaagcaggtaatggaaggccgggatataaagctagtaatcaatcagacagcgcaggactgcttcggatgcctggaatccataagccaaataagaacggcaacccgagataaaaaggacacggtgacccgggagaaacacccaaagaaaccttttcagaagtggatgaagaagagagcaatcaaaaaaggtaattatcttcggttccagcgtttattttatcttgatagagggaaactggctaaaatcattttagatgatattgaatgcttgtcttgtgacatccctcttagcgagatctacagcgttttcaagaccagatgggagaccaccggcagcttcaagagcctgggcgacttcaagacatacggcaaggccgacaacaccgccttcagagagctcatcaccgccaaggagatcgagaagaatgtgcaggagatgagcaagggctccgcgccagggcccgatggaattacattaggcgatgtggtgaagatggaccccgagttcagcagaaccatggagatcttcaacctgtggctcaccaccgggaagatccccgacatggttagaggctgcagaaccgttctcatccccaagagcagcaagcccgacagactgaaggacatcaacaactggagacccatcaccatcggcagcatcctgctgagactgttctccagaatcgtgaccgccagactgtccaaggcctgccctctgaaccctagacagagaggcttcatcagagctgccggctgcagcgagaacctgaagcttctgcagaccatcatctggagcgccaagagagagcacagacccctgggcgttgtgttcgtggacatcgccaaggctttcgacactgtgagccaccagcacatcatccacgccctgcaacagcgagaggtcgaccctcacatcgtgggccttgtgagcaacatgtacgagaacatcagcacctacatcaccaccaagagaaacacccacaccgacaagatccagatacgtgtgggcgtcaagcagggcgaccctatgagccctcttctgttcaacctcgccatggaccctctgctgtgcaagctggaggagtctggcaagggataccacagaggccagagctcgattactgccatggccttcgccgacgacctggtgcttctgagcgattcttgggagaacatgaacaccaacatctccatcctcgagaccttctgcaacctcaccggcctgaaaacccagggccaaaagtgccacggcttctacatcaagcccaccaaggacagctacaccatcaacgactgcgctgcctggaccatcaatggcacccctctcaacatgatcgaccccggcgagagcgagaagtacctgggcttacagttcgacccttggatcggcatcgccagaagcggccttagcacaaagttggacttctggctccagagaatcgaccaggcccccctgaagcctcttcagaaaaccgacatcctgaaaacctacacaatccccagactcatctacatcgccgaccacagcgaggtcaagagcgcactactcgaaacccttgaccagaagatccggacagcggtcaaggaatggcttcacctacctccgtgcacctgcgatgccatcctgtactcgagcacgagagacggcggtttgggcatcaccaaattggcaggactgatccccagcgtgcaggcccgtagactgcatcggatcgcacagtcatctgacgatacgatgaaatgcttcatggaaaaagagaaaatggaacagctgcataagaaattgtggattcaagctggaggggacagagagaacataccctcgatttgggaagcaccaccgtcgagtgaaccaccaaacaacgtgagcacaaattcggaatgggaagcaccgacccagaaagataaatttccaaagccttgcaattggaggaaaaacgaattcaaaaaatggaccaaattggcatcccaaggccgcggaattgtaaattttgaaagagacaaaattagtaaccattggatccaatactacagacgcatacctcacaggaaactcctcactgcactacaactcagggccaacgtttaccccacgagagaatttctagccaggggtagacaagaccaatacatcaaggcgtgtaggcactgcgatgcggacaacgaatcctgcgcccacatcatcggcaactgcccagtgacacaggacgcccgaatcaagaggcacaattacatctgcgaactgcttctcgaggaggcgaagaagaaggactgggtagtgttcaaggaaccgcacataagggattccaacaaggaactgtacaaacctgacctgatatttgtgaaggatgggcgtgcacttgtcgtggatgtgacagtacggtatgaagcagccaaatcatcgctggaggaagccgctgcagagaaagtgagaaagtacaaacacctggaaacggaagtaagacatctcacgaatgcaaaggacgttacttttgtgggctttcccctaggagcgcgggggaaatggcaccaagataactttaaacttttgactgagcttggcctctccaaatcgaggcaagtgaaaatggcagagactttttccacagtagcgctcttttcatctgtggacattgtacatatgtttgccagtagggccagaaaatctatggttatgtccggctccgagactcctggaacaagcgagagcgctacacctgaggctatggcctccatcgaggataatcctgagatagaggacgacatcttcagaaagaagagactgacaatcatggacctgcaccccggcgccggcaagaccaagcggtacctgcctgctatcgtgcgggaggctattaagagaggactgagaacactgatcctggcccctacccgggtggtggccgcagagatggaagaggccctgagaggcctgcccatcagataccagaccccagccatcagagccgagcacacaggcagagagatcgttgacctgatgtgccacgccacatttaccatgcggctgctgagccctatccgcgtgcccaactacaacctgatcatcatggacgaggcccacttcaccgaccctgccagcatcgccgccagaggatacatcagcaccagagtggaaatgggcgaggccgccggcatctttatgaccgctacaccacctggatctagagatcctttcccccagtccaacgcccctatcatggatgaagaacgggaaatccccgagagatcctggaacagcggccacgagtgggtgacagatttcaagggcaaaaccgtgtggttcgtgcctagcatcaaagccggcaacgatatcgccgcttgtctgcggaaaaatggcaagaaagtgatccagctgagcagaaagacctttgatagcgagtacatcaagactcggaccaacgactgggacttcgtggtcacaaccgacatcagcgagatgggggccaacttcaaggccgagcgggtcatcgaccccagacggtgcatgaaacctgtgatcctcacagacggcgaggaaagagtgatcctggccggacctatgcctgtgacccacagctctgccgcccagagacgtggaagagtgggcagaaaccccaagaacgagaatgaccaatacatctacatgggcgagccactggaaaacgatgaggactgcgcccattggaaggaggccaagatgctgctggacaacattaacacccctgagggaatcatccccagcatgttcgagcctgaaagagagaaggtggatgccattgacggcgagtaccggctgcgcggcgaggccagaaagaccttcgtggacctgatgagacggggcgacctgcctgtttggctggcttacagagtggccgctgaaggcatcaactatgccgacagaagatggtgcttcgacggcgtgaagaacaaccagatcctggaagaaaatgtggaagtggaaatctggaccaaggaaggcgaaaggaagaagctgaagcctagatggcttgatgcccggatctattctgatcccctggctctgaaggaattcaaagagttcgccgccggcagaaagggcggatctggcaaaagaaccgctgatggcagcgagttcgagagccccaagaaaaagagaaaggtgtgataataggctgccttctgcggggcttgccttctggccatgcccttcttctctcccttgcacctgtacctcttggtctttgaataaagcctgagtaggaaggaccggtaaaaaaaaaaaaaaaaaaaaaaaaaaaaaaacgttgactaaaaaaaaaaaaaaaaaaaaaaaaaaaaaaaaaaaaaaaaaaaaaaaaaaaaaaaaaaaaaaaaaaaaaa

SEQ ID NO: 11798 - DNA, 5243 bp, synthetic construct
  source 1..5243: mol_type = other DNA
gaaataagagagaaaagaagagtaagaagaaatataagagaattcgccaccatggcccctaagagaaaggtgtccagcgccgagggcgctgccaaggaagagcctaaacggagaagcgccagactgagcgccaagccccccgccaaggtggaagccaagcctaagaaggccgccgctaaggacaagagcagcgataagaaagtccagaccaagggcaagcggggcgccaaaggcaaacaggccgaggtggccaaccaggagacaaaggaagatctgcctgctgagaacggcgaaaccaagaccgaggaatctccagcttctgacgaggccggagagaaggaggccaaaagcgacagcggctctgagacacctggaacaagcgagagcgccaccccggaatccaatatcagcggctctagctgcggcagccccaacagcgccgacaccagcagcgacttcaaggacctgtggaccaagctgaaggaatgccacgaccgggaagtgcagggactccaggtgaaggtcaccaaactcaagcaagaaagaatcctggacgcccagagactggaagaattcttcaccaagaaccagcagctgagagagcagcagaaagtgctgcacgagacaatcaaggttctggaagatagactgcgggccggcctgtgcgacagatgcgccgtgaccgaggaacacatgcgcaaaaagcagcaggagttcgagaacattagacagcaaaatctgaaattgatcacagagctgatgaacgagagaaacacactgcaggaggagaacaagaagctgagcgagcagctgcaacagaagatcgagaatgatcagcaacaccaggccgctgagctggaatgtgaagaggacgtgatccccgacagcccaatcacagctttcagcttttctggcgtgaacagactgaggcggaaggaaaacccccacgtgcggtacatcgagcagacccataccaagctggaacacagcgtgtgtgccaacgagatgagaaaggtgtccaagtcctccacccatccccagcacaaccctaacgaaaatgagatcctggtggctgatacctacgaccagtctcagagccctatggccaaggcccacggcaccagctcttatacccctgataagagctccttcaacctggccaccgtggtggccgagacactgggcctgggcgtgcaggaggaaagcgagacacagggcccaatgagccctctgggagatgagctgtaccactgcctggaaggcaaccacaagaaacagccttttgagtccggctccgagactcctggaacaagcgagagcgctacacctgagggcagctatgaacaacttgcaccacaaccgtgtgtgggagaaactttacattctagcctcccacgagacagtgaactgtttgtgcctgaagaggggagcagcgagaaggagagcgaggacgcgccaaaaacatctcctccgacgcctgggaaacatggtttggaacagactggggaggaaaaagtgatggtgactgttcctgacaaaaatccaccttgtccttgctgtggtacccgggtaaactctgtgttgaatctgattgaacatctgaaagtgtcacacgggaaaaggggggtttgttttcggtgtgcaaaatgtggaaaggaaaatagtaactatcacagtgttgtttgtcattttaagaaatgcaggggtccagagacggagaaagccccagctggggagtggatttgtgaggtatgcaacagagattttacaaccaaaattggcctgggacaacacaagagattggcacacccagcagtgagaaatcaggaaaggatcgttgcttcccaaccgaaagaaacatcaaatagaggtgctcacaaaaggtgctggacaaaggaggaggaagaattactaataagactggaggctcagttcgagggaaacaaaaatattaataagcttattgcagaacacataaccaccaaaacagctaagcagatcagtgacaaaaggcgattgctgtccagaaagccagcagaggagccacgtgaggagcctggaacgtgtcatcacaccaggagagcagctgcgagcctgagaacggagcctgagatgagtcatcacgcccaggcagaggacagagataatggacctgggagacgccctctgccaggcagggcagctgccggagggagaacaatggacgagataagacgccaccctgataagggcaacggacagcagagacccaccaagcaaaaatcagaagaacagctgcaggcttactataaaaagacactagaggaacgactttcagctggggcacttaacaccttcccccgagcattcaagcaggtaatggaaggccgggatataaagctagtaatcaatcagacagcgcaggactgcttcggatgcctggaatccataagccaaataagaacggcaacccgagataaaaaggacacggtgacccgggagaaacacccaaagaaaccttttcagaagtggatgaagaagagagcaatcaaaaaaggtaattatcttcggttccagcgtttattttatcttgatagagggaaactggctaaaatcattttagatgatattgaatgcttgtcttgtgacatccctcttagcgagatctacagcgttttcaagaccagatgggagaccaccggcagcttcaagagcctgggcgacttcaagacatacggcaaggccgacaacaccgccttcagagagctcatcaccgccaaggagatcgagaagaatgtgcaggagatgagcaagggctccgcgccagggcccgatggaattacattaggcgatgtggtgaagatggaccccgagttcagcagaaccatggagatcttcaacctgtggctcaccaccgggaagatccccgacatggttagaggctgcagaaccgttctcatccccaagagcagcaagcccgacagactgaaggacatcaacaactggagacccatcaccatcggcagcatcctgctgagactgttctccagaatcgtgaccgccagactgtccaaggcctgccctctgaaccctagacagagaggcttcatcagagctgccggctgcagcgagaacctgaagcttctgcagaccatcatctggagcgccaagagagagcacagacccctgggcgttgtgttcgtggacatcgccaaggctttcgacactgtgagccaccagcacatcatccacgccctgcaacagcgagaggtcgaccctcacatcgtgggccttgtgagcaacatgtacgagaacatcagcacctacatcaccaccaagagaaacacccacaccgacaagatccagatacgtgtgggcgtcaagcagggcgaccctatgagccctcttctgttcaacctcgccatggaccctctgctgtgcaagctggaggagtctggcaagggataccacagaggccagagctcgattactgccatggccttcgccgacgacctggtgcttctgagcgattcttgggagaacatgaacaccaacatctccatcctcgagaccttctgcaacctcaccggcctgaaaacccagggccaaaagtgccacggcttctacatcaagcccaccaaggacagctacaccatcaacgactgcgctgcctggaccatcaatggcacccctctcaacatgatcgaccccggcgagagcgagaagtacctgggcttacagttcgacccttggatcggcatcgccagaagcggccttagcacaaagttggacttctggctccagagaatcgaccaggcccccctgaagcctcttcagaaaaccgacatcctgaaaacctacacaatccccagactcatctacatcgccgaccacagcgaggtcaagagcgcactactcgaaacccttgaccagaagatccggacagcggtcaaggaatggcttcacctacctccgtgcacctgcgatgccatcctgtactcgagcacgagagacggcggtttgggcatcaccaaattggcaggactgatccccagcgtgcaggcccgtagactgcatcggatcgcacagtcatctgacgatacgatgaaatgcttcatggaaaaagagaaaatggaacagctgcataagaaattgtggattcaagctggaggggacagagagaacataccctcgatttgggaagcaccaccgtcgagtgaaccaccaaacaacgtgagcacaaattcggaatgggaagcaccgacccagaaagataaatttccaaagccttgcaattggaggaaaaacgaattcaaaaaatggaccaaattggcatcccaaggccgcggaattgtaaattttgaaagagacaaaattagtaaccattggatccaatactacagacgcatacctcacaggaaactcctcactgcactacaactcagggccaacgtttaccccacgagagaatttctagccaggggtagacaagaccaatacatcaaggcgtgtaggcactgcgatgcggacaacgaatcctgcgcccacatcatcggcaactgcccagtgacacaggacgcccgaatcaagaggcacaattacatctgcgaactgcttctcgaggaggcgaagaagaaggactgggtagtgttcaaggaaccgcacataagggattccaacaaggaactgtacaaacctgacctgatatttgtgaaggatgggcgtgcacttgtcgtggatgtgacagtacggtatgaagcagccaaatcatcgctggaggaagccgctgcagagaaagtgagaaagtacaaacacctggaaacggaagtaagacatctcacgaatgcaaaggacgttacttttgtgggctttcccctaggagcgcgggggaaatggcaccaagataactttaaacttttgactgagcttggcctctccaaatcgaggcaagtgaaaatggcagagactttttccacagtagcgctcttttcatctgtggacattgtacatatgtttgccagtagggccagaaaatctatggttatgtgataataggctgccttctgcggggcttgccttctggccatgcccttcttctctcccttgcacctgtacctcttggtctttgaataaagcctgagtaggaaggaccggtaaaaaaaaaaaaaaaaaaaaaaaaaaaaaaacgttgactaaaaaaaaaaaaaaaaaaaaaaaaaaaaaaaaaaaaaaaaaaaaaaaaaaaaaaaaaaaaaaaaaaaaaa

SEQ ID NO: 11799 - DNA, 6107 bp, synthetic construct
  source 1..6107: mol_type = other DNA
gaaataagagagaaaagaagagtaagaagaaatataagagaattcgccaccatggcccctaagaaaaagcggaaggtgaatatcagcggctctagctgcggcagccccaacagcgccgacaccagcagcgacttcaaggacctgtggaccaagctgaaggaatgccacgaccgggaagtgcagggactccaggtgaaggtcaccaaactcaagcaagaaagaatcctggacgcccagagactggaagaattcttcaccaagaaccagcagctgagagagcagcagaaagtgctgcacgagacaatcaaggttctggaagatagactgcgggccggcctgtgcgacagatgcgccgtgaccgaggaacacatgcgcaaaaagcagcaggagttcgagaacattagacagcaaaatctgaaattgatcacagagctgatgaacgagagaaacacactgcaggaggagaacaagaagctgagcgagcagctgcaacagaagatcgagaatgatcagcaacaccaggccgctgagctggaatgtgaagaggacgtgatccccgacagcccaatcacagctttcagcttttctggcgtgaacagactgaggcggaaggaaaacccccacgtgcggtacatcgagcagacccataccaagctggaacacagcgtgtgtgccaacgagatgagaaaggtgtccaagtcctccacccatccccagcacaaccctaacgaaaatgagatcctggtggctgatacctacgaccagtctcagagccctatggccaaggcccacggcaccagctcttatacccctgataagagctccttcaacctggccaccgtggtggccgagacactgggcctgggcgtgcaggaggaaagcgagacacagggcccaatgagccctctgggagatgagctgtaccactgcctggaaggcaaccacaagaaacagccttttgagtccggctccgagactcctggaacaagcgagagcgctacacctgagggcagccctaagagaaaggtgtccagcgccgagggcgctgccaaggaagagcctaaacggagaagcgccagactgagcgccaagccccccgccaaggtggaagccaagcctaagaaggccgccgctaaggacaagagcagcgataagaaagtccagaccaagggcaagcggggcgccaaaggcaaacaggccgaggtggccaaccaggagacaaaggaagatctgcctgctgagaacggcgaaaccaagaccgaggaatctccagcttctgacgaggccggagagaaggaggccaaaagcgacagcggctctgagacacctggaacaagcgagagcgccaccccggaatcctatgaacaacttgcaccacaaccgtgtgtgggagaaactttacattctagcctcccacgagacagtgaactgtttgtgcctgaagaggggagcagcgagaaggagagcgaggacgcgccaaaaacatctcctccgacgcctgggaaacatggtttggaacagactggggaggaaaaagtgatggtgactgttcctgacaaaaatccaccttgtccttgctgtggtacccgggtaaactctgtgttgaatctgattgaacatctgaaagtgtcacacgggaaaaggggggtttgttttcggtgtgcaaaatgtggaaaggaaaatagtaactatcacagtgttgtttgtcattttaagaaatgcaggggtccagagacggagaaagccccagctggggagtggatttgtgaggtatgcaacagagattttacaaccaaaattggcctgggacaacacaagagattggcacacccagcagtgagaaatcaggaaaggatcgttgcttcccaaccgaaagaaacatcaaatagaggtgctcacaaaaggtgctggacaaaggaggaggaagaattactaataagactggaggctcagttcgagggaaacaaaaatattaataagcttattgcagaacacataaccaccaaaacagctaagcagatcagtgacaaaaggcgattgctgtccagaaagccagcagaggagccacgtgaggagcctggaacgtgtcatcacaccaggagagcagctgcgagcctgagaacggagcctgagatgagtcatcacgcccaggcagaggacagagataatggacctgggagacgccctctgccaggcagggcagctgccggagggagaacaatggacgagataagacgccaccctgataagggcaacggacagcagagacccaccaagcaaaaatcagaagaacagctgcaggcttactataaaaagacactagaggaacgactttcagctggggcacttaacaccttcccccgagcattcaagcaggtaatggaaggccgggatataaagctagtaatcaatcagacagcgcaggactgcttcggatgcctggaatccataagccaaataagaacggcaacccgagataaaaaggacacggtgacccgggagaaacacccaaagaaaccttttcagaagtggatgaagaagagagcaatcaaaaaaggtaattatcttcggttccagcgtttattttatcttgatagagggaaactggctaaaatcattttagatgatattgaatgcttgtcttgtgacataccactcagtgaaatttattcggtttttaaaacaagatgggaaacaactggtagctttaaaagccttggggactttaaaacttacgggaaggctgacaacactgccttcagagaattaattacggctaaagaaattgagaaaaatgtgcaggaaatgagcaaaggctcggctcccggtccagacgggattactcttggggacgtcgtaaagatggatcccgagttttcccggaccatggagattttcaatttatggttaacaactggtaaaatcccggacatggtgagggggtgcagaaccgttttgattccaaaatcatcaaagccggatcgtttgaaagacattaataactggagacctatcacgatcggttccatcttgctgagactgttctccaggattgtaacagctaggctgagcaaagcgtgccccctgaacccaaggcaaagaggctttatcagagcggcgggatgctctgaaaacttaaaactcctgcaaactataatttggtcggccaaaagagaacacagaccactgggtgttgtattcgtggacatcgccaaggcttttgacaccgtaagccaccagcacatcattcatgctttgcagcaaagagaggtggatccccacatcgtcggtctggtgagcaatatgtacgagaacatcagtacgtatatcaccacaaagaggaacacacacacagacaaaatccagatccgggttggagtaaagcagggtgacccgatgtcgccccttttatttaacctggcaatggaccctctattatgcaagctggaagagagtggcaaaggataccaccgaggacagagcagcatcacagcgatggcatttgcagacgatctggttttgctgagcgactcctgggaaaatatgaatacaaatattagcatactggagaccttctgcaatctgaccggactcaaaacacaggggcaaaagtgccacggcttttacatcaagccgacaaaggactcttacaccatcaatgactgcgctgcctggactatcaacggcacacccctgaacatgatcgaccccggcgaatctgagaaatacctcggcctgcagtttgacccgtggattggaatagcaaggtccggtctctccacaaaactagatttttggcttcagcggatcgatcaagcaccacttaaacctctgcagaaaactgatattctcaaaacatacaccatccctcggctgatctacatagctgaccactcagaagtgaaaagcgcactactcgaaacccttgaccagaagatccggacagcggtcaaggaatggcttcacctacctccgtgcacctgcgatgccatcctgtactcgagcacgagagacggcggtttgggcatcaccaaattggcaggactgatccccagcgtgcaggcccgtagactgcatcggatcgcacagtcatctgacgatacgatgaaatgcttcatggaaaaagagaaaatggaacagctgcataagaaattgtggattcaagctggaggggacagagagaacataccctcgatttgggaagcaccaccgtcgagtgaaccaccaaacaacgtgagcacaaattcggaatgggaagcaccgacccagaaagataaatttccaaagccttgcaattggaggaaaaacgaattcaaaaaatggaccaaattggcatcccaaggccgcggaattgtaaattttgaaagagacaaaattagtaaccattggatccaatactacagacgcatacctcacaggaaactcctcactgcactacaactcagggccaacgtttaccccacgagagaatttctagccaggggtagacaagaccaatacatcaaggcgtgtaggcactgcgatgcggacaacgaatcctgcgcccacatcatcggcaactgcccagtgacacaggacgcccgaatcaagaggcacaattacatctgcgaactgcttctcgaggaggcgaagaagaaggactgggtagtgttcaaggaaccgcacataagggattccaacaaggaactgtacaaacctgacctgatatttgtgaaggatgggcgtgcacttgtcgtggatgtgacagtacggtatgaagcagccaaatcatcgctggaggaagccgctgcagagaaagtgagaaagtacaaacacctggaaacggaagtaagacatctcacgaatgcaaaggacgttacttttgtgggctttcccctaggagcgcgggggaaatggcaccaagataactttaaacttttgactgagcttggcctctccaaatcgaggcaagtgaaaatggcagagactttttccacagtagcgctcttttcatctgtggacattgtacatatgtttgccagtagggccagaaaatctatggttatgtctggaggatctagcggaggatcctctggcagcgagacaccaggaacaagcgagtcagcaacaccagagagcagtggcggcagcagcggcggcagcagcatgggaactgcactaacaccgctcctgacgaagttcgccacgcgctacgagatgggtaccacgcctgaagaagtggcgaacacgctcaagcagacctgtttcaagggccaggtcaatgattcgcagatggtcgccctgctgatcgtggcagaccagtacaagcttaaccccttcaccaaggagttgtacgcattccccgacaagaacaacggcatcgtgccggttgttggtgtggatggctgggctcggatcatcaacgagaacccacagttcgatggcatggaattctcaatggaccagcagggaaccgaatgcacctgcaagatctatcggaaggaccgcagccatgccatcagcgcgactgagtacatggccgagtgcaagcggaacacccagccttggcagtcccatccgcgccggatgcttcgccacaaggcaatgatccagtgcgcacgcctcgcgttcgggttcgccggcatatacgaccaggacgaggccgagcggatcgttgaacgagacgtcactcccgcagagcagtacgaggacgtcagcgaggcgatctgcctgatcaaggactccccaacaatggaggacttgcaggcagcattcagcaatgcctggaaagcctataagacaaagggcgcgcgcgaccagcttacggcggccaaggaccagcggaagaaagaattgctggacgcccctatagacgttgaattcgaggagaccggcgatgatcgagcagcgtgataataggctgccttctgcggggcttgccttctggccatgcccttcttctctcccttgcacctgtacctcttggtctttgaataaagcctgagtaggaaggaccggtaaaaaaaaaaaaaaaaaaaaaaaaaaaaaaacgttgactaaaaaaaaaaaaaaaaaaaaaaaaaaaaaaaaaaaaaaaaaaaaaaaaaaaaaaaaaaaaaaaaaaaaaa

SEQ ID NO: 11800 - DNA, 4725 bp, synthetic construct
  source 1..4725: mol_type = other DNA
ggaaataagagagaaaagaagagtaagaagaaatataagagaattcgccaccatggctagctgccctaagcctggacctcctgtgtctgctggcgctatgagcctggagagcggacttaccacccactctgtgctggccatcgagagaggccccaactctctggccaactctggcagcgatttcggcggaggaggacttggcctgcctctgagacttctgagagtttctgtgggcacccagaccagcagaagcgactgggtcgaccttgtgagctggagccaccctggtcctacaagcaagagccagcaggtcgatctggtgagcctgttccccaagcacagagtcgacctgctgagcaagaacgaccaggtcgacttggtggcccagttcctgcctagcaagttccctcccaacctggctgagaacgacttagccctgctggtgaacctggagttctatcgttccgacctgcacgtgtacgagtgcgtgcacttcgctgcccattgggagggcttaagcggccttcctgaggtgtacgaacagctggctccccagccctgtgtaggcgagacattacacagcagcctgcccagagacagcgagctgttcgttccggaagagggctctagcgagaaggagagcgaggacgctcctaagaccagccctcctacccctggcaaacacggcctggagcaaacaggcgaggagaaggtcatggtgaccgtgcccgacaagaaccctccctgtccttgctgtggcacaagagtcaacagcgtgctgaacctcatcgagcacctgaaggtgtcccacggcaagagaggcgtgtgcttcagatgcgccaagtgcggcaaggagaacagcaactaccacagcgtcgtgtgccacttcaagaagtgcagaggccctgagaccgagaaggctcccgctggcgaatggatttgcgaggtgtgcaacagagacttcaccaccaagatcggcctgggccagcacaagcggttagctcaccctgctgtgagaaaccaggagagaatcgtggccagccagcccaaggagacaagcaacaggggcgctcacaagagatgctggaccaaggaggaagaggagctgctcatcagactggaggctcagttcgagggcaacaagaacatcaataagcttatcgccgagcacatcaccacaaagaccgccaagcagatcagcgacaagaggagactgctgtccagaaagcccgccgaggagcctagagaggaacctggtacatgtcaccacaccagaagagccgccgctagcctgagaaccgagcccgaaatgtctcaccacgctcaggccgaggacagagacaacggccctggcaggagacctcttcccggcagagctgctgctggaggcagaaccatggacgagatcaggagacaccccgataagggcaacggccagcagagacccacaaagcagaagtccgaggaacagctccaggcctactacaagaaaaccctggaggagagactgtccgcgggagctctgaacaccttccctagagccttcaaacaagtcatggagggcagagacatcaagctggtgatcaaccagaccgcccaggactgcttcggctgccttgagtctatcagccagatcaggaccgccacacgggataagaaggacaccgtcaccagagagaagcaccccaagaagcccttccagaaatggatgaagaagagggccatcaagaagggcaattacctgagattccagaggctgttctacctggacagaggcaagctggccaagatcatcctggacgacatcgagtgcctgagctgcgacatccctctgagcgagatctacagcgtgttcaagaccagatgggagaccaccggcagcttcaagtctctgggcgacttcaagacatacggcaaggccgacaacaccgccttcagagagctcatcaccgctaaggagatcgagaagaacgtgcaggagatgagcaagggcagcgctcctggccccgatggaattacactgggcgatgtggtgaagatggaccccgagttcagcagaacaatggagatcttcaacctgtggctcaccacaggcaagatccccgacatggtgagaggctgcagaaccgtgcttatccccaagagcagcaagcccgacagactgaaggatatcaacaactggagacccatcaccatcggcagcatcctgctgcggctgttcagccggattgtgaccgctagactgagcaaagcctgtcccctgaaccccagacagagaggcttcatcagagccgctggctgcagcgagaacctgaagctgctccagacaatcatctggagcgccaagagagagcacagacccctgggcgttgttttcgtggacatcgccaaggccttcgacaccgtgtcccatcagcacattatccacgccctgcagcagagggaggtcgaccctcatattgtgggcctggtgtccaacatgtacgagaacatctccacctatattacgaccaagagaaacacccacacagacaagatccagatccgggtcggcgtcaagcagggcgatcctatgtctcctctgctgttcaacctcgccatggaccctctgctctgcaagctcgaggagtctggaaagggctaccatagaggccaatcatcgatcaccgccatggccttcgccgacgacctggtgcttttaagcgacagctgggagaacatgaacaccaacatctctatcctggagacattctgcaaccttaccggcctgaaaacccagggccagaagtgtcatggcttctacatcaaacccaccaaggacagctacaccatcaacgactgcgccgcctggacaatcaacggcacccctctcaacatgatcgaccccggcgagtctgagaagtacctgggcctgcagttcgatccctggatcggcatcgctagaagcggcttgagcaccaagctggacttttggctccaacgcatagaccaggcccccctgaagcctcttcagaaaaccgacattttgaaaacttatacgatccccagactcatctacatcgccgaccactccgaggtcaagagcgctctgctggaaaccctggaccagaaaatcagaaccgccgtcaaggaatggctgcacctgcccccttgcacatgcgacgctatcctgtacagcagcaccagggacggcggcttaggaatcaccaagttagccggcctcatccccagcgtgcaggctaggagactccacagaatcgcccagagcagcgacgacaccatgaagtgcttcatggagaaggaaaagatggagcagctgcacaagaagctgtggatccaagcgggcggagatcgtgagaacattcccagcatctgggaggcccctcccagctcagaacctcccaataacgtgtccaccaattctgaatgggaggctcccacccagaaggataagtttcccaagccctgcaactggcggaagaacgagttcaaaaaatggacaaagctggctagccagggcaggggcatcgtgaacttcgaaagggacaagattagcaaccactggatccagtactacagaagaatcccccacagaaagctcctcaccgccctccagttacgtgcaaacgtgtacccaaccagagaattcctggccagaggcagacaggaccagtacatcaaggcctgccggcactgcgatgccgataacgagagctgtgctcacatcatcggcaactgccccgtcacccaggacgccagaatcaagagacacaactacatctgcgagttacttctggaggaagccaagaagaaggattgggttgtgttcaaggagccccacatcagagactccaacaaggagctgtacaagccagacctcatcttcgtgaaggacgctagagccctggtggtggacgtcaccgtcagatacgaggctgctaagtccagccttgaggaggctgccgccgagaaagtgcggaagtacaagcacctggaaacagaggtcagacacctcaccaacgccaaggacgttaccttcgtgggcttccccctaggtgctagaggcaaatggcaccaggacaacttcaagctgcttaccgagctgggcctctccaagagccgacaggttaagatggccgagaccttcagcaccgtcgccctgttctcttctgtggacattgtgcacatgttcgcctccagagccagaaagagcatggtgatgagcggctctgagacacctggaacaagcgagagcgccaccccggaatctaccaaccccaagcctcagaaaaagaacaagcggaacaccaatagacggcctcaagacgtgaagttccccggcggcggacagatcgtgggcggagtctacctgctgcctcgcagaggcccaagactgggcgtgcgggccacaagaaagaccagcgagcggagccagcctagatctggcggctcaaaacggacagccgacggaagcgagttcgagtcaccaaagaagaagcggaaagtctgataataggctgccttctgcggggcttgccttctggccatgcccttcttctctcccttgcacctgtacctcttggtctttgaataaagcctgagtaggaaggaccggtaaaaaaaaaaaaaaaaaaaaaaaaaaaaaaacgttgactaaaaaaaaaaaaaaaaaaaaaaaaaaaaaaaaaaaaaaaaaaaaaaaaaaaaaaaaaaaaaaaaaaaaaa

SEQ ID NO: 11801 - DNA, 6498 bp, synthetic construct
  source 1..6498: mol_type = other DNA
ggaaataagagagaaaagaagagtaagaagaaatataagagaattcgccaccatggctagctgccctaagcctggacctcctgtgtctgctggcgctatgagcctggagagcggacttaccacccactctgtgctggccatcgagagaggccccaactctctggccaactctggcagcgatttcggcggaggaggacttggcctgcctctgagacttctgagagtttctgtgggcacccagaccagcagaagcgactgggtcgaccttgtgagctggagccaccctggtcctacaagcaagagccagcaggtcgatctggtgagcctgttccccaagcacagagtcgacctgctgagcaagaacgaccaggtcgacttggtggcccagttcctgcctagcaagttccctcccaacctggctgagaacgacttagccctgctggtgaacctggagttctatcgttccgacctgcacgtgtacgagtgcgtgcacttcgctgcccattgggagggcttaagcggccttcctgaggtgtacgaacagctggctccccagccctgtgtaggcgagacattacacagcagcctgcccagagacagcgagctgttcgttccggaagagggctctagcgagaaggagagcgaggacgctcctaagaccagccctcctacccctggcaaacacggcctggagcaaacaggcgaggagaaggtcatggtgaccgtgcccgacaagaaccctccctgtccttgctgtggcacaagagtcaacagcgtgctgaacctcatcgagcacctgaaggtgtcccacggcaagagaggcgtgtgcttcagatgcgccaagtgcggcaaggagaacagcaactaccacagcgtcgtgtgccacttcaagaagtgcagaggccctgagaccgagaaggctcccgctggcgaatggatttgcgaggtgtgcaacagagacttcaccaccaagatcggcctgggccagcacaagcggttagctcaccctgctgtgagaaaccaggagagaatcgtggccagccagcccaaggagacaagcaacaggggcgctcacaagagatgctggaccaaggaggaagaggagctgctcatcagactggaggctcagttcgagggcaacaagaacatcaataagcttatcgccgagcacatcaccacaaagaccgccaagcagatcagcgacaagaggagactgctgtccagaaagcccgccgaggagcctagagaggaacctggtacatgtcaccacaccagaagagccgccgctagcctgagaaccgagcccgaaatgtctcaccacgctcaggccgaggacagagacaacggccctggcaggagacctcttcccggcagagctgctgctggaggcagaaccatggacgagatcaggagacaccccgataagggcaacggccagcagagacccacaaagcagaagtccgaggaacagctccaggcctactacaagaaaaccctggaggagagactgtccgcgggagctctgaacaccttccctagagccttcaaacaagtcatggagggcagagacatcaagctggtgatcaaccagaccgcccaggactgcttcggctgccttgagtctatcagccagatcaggaccgccacacgggataagaaggacaccgtcaccagagagaagcaccccaagaagcccttccagaaatggatgaagaagagggccatcaagaagggcaattacctgagattccagaggctgttctacctggacagaggcaagctggccaagatcatcctggacgacatcgagtgcctgagctgcgacatccctctgagcgagatctacagcgtgttcaagaccagatgggagaccaccggcagcttcaagtctctgggcgacttcaagacatacggcaaggccgacaacaccgccttcagagagctcatcaccgctaaggagatcgagaagaacgtgcaggagatgagcaagggcagcgctcctggccccgatggaattacactgggcgatgtggtgaagatggaccccgagttcagcagaacaatggagatcttcaacctgtggctcaccacaggcaagatccccgacatggtgagaggctgcagaaccgtgcttatccccaagagcagcaagcccgacagactgaaggatatcaacaactggagacccatcaccatcggcagcatcctgctgcggctgttcagccggattgtgaccgctagactgagcaaagcctgtcccctgaaccccagacagagaggcttcatcagagccgctggctgcagcgagaacctgaagctgctccagacaatcatctggagcgccaagagagagcacagacccctgggcgttgttttcgtggacatcgccaaggccttcgacaccgtgtcccatcagcacattatccacgccctgcagcagagggaggtcgaccctcatattgtgggcctggtgtccaacatgtacgagaacatctccacctatattacgaccaagagaaacacccacacagacaagatccagatccgggtcggcgtcaagcagggcgatcctatgtctcctctgctgttcaacctcgccatggaccctctgctctgcaagctcgaggagtctggaaagggctaccatagaggccaatcatcgatcaccgccatggccttcgccgacgacctggtgcttttaagcgacagctgggagaacatgaacaccaacatctctatcctggagacattctgcaaccttaccggcctgaaaacccagggccagaagtgtcatggcttctacatcaaacccaccaaggacagctacaccatcaacgactgcgccgcctggacaatcaacggcacccctctcaacatgatcgaccccggcgagtctgagaagtacctgggcctgcagttcgatccctggatcggcatcgctagaagcggcttgagcaccaagctggacttttggctccaacgcatagaccaggcccccctgaagcctcttcagaaaaccgacattttgaaaacttatacgatccccagactcatctacatcgccgaccactccgaggtcaagagcgctctgctggaaaccctggaccagaaaatcagaaccgccgtcaaggaatggctgcacctgcccccttgcacatgcgacgctatcctgtacagcagcaccagggacggcggcttaggaatcaccaagttagccggcctcatccccagcgtgcaggctaggagactccacagaatcgcccagagcagcgacgacaccatgaagtgcttcatggagaaggaaaagatggagcagctgcacaagaagctgtggatccaagcgggcggagatcgtgagaacattcccagcatctgggaggcccctcccagctcagaacctcccaataacgtgtccaccaattctgaatgggaggctcccacccagaaggataagtttcccaagccctgcaactggcggaagaacgagttcaaaaaatggacaaagctggctagccagggcaggggcatcgtgaacttcgaaagggacaagattagcaaccactggatccagtactacagaagaatcccccacagaaagctcctcaccgccctccagttacgtgcaaacgtgtacccaaccagagaattcctggccagaggcagacaggaccagtacatcaaggcctgccggcactgcgatgccgataacgagagctgtgctcacatcatcggcaactgccccgtcacccaggacgccagaatcaagagacacaactacatctgcgagttacttctggaggaagccaagaagaaggattgggttgtgttcaaggagccccacatcagagactccaacaaggagctgtacaagccagacctcatcttcgtgaaggacgctagagccctggtggtggacgtcaccgtcagatacgaggctgctaagtccagccttgaggaggctgccgccgagaaagtgcggaagtacaagcacctggaaacagaggtcagacacctcaccaacgccaaggacgttaccttcgtgggcttccccctaggtgctagaggcaaatggcaccaggacaacttcaagctgcttaccgagctgggcctctccaagagccgacaggttaagatggccgagaccttcagcaccgtcgccctgttctcttctgtggacattgtgcacatgttcgcctccagagccagaaagagcatggtgatgagcggctctgagacacctggaacaagcgagagcgccaccccggaaggctgcgtgtccatcatcggccggctgcacgtgaaccagcggggctcaggcagcgccagcatcacagcctacgctcagcagacaagaggcctgctgggcgccatcgtggtgagcatgaccggcagagatagaaccgagcaggccggcgaggtgcagatcctgagcaccgtgtcccagagcttcctcggcacaaccatcagcggcgtgctgtggacagtgtaccacggcgccggcaacaagaccctggccggcctgcgaggccctgtgactcagatgtactctagcgccgagggcgatctggtcggctggcctagcccacccggcacaaaaagcctggaaccctgcaagtgcggcgccgtggacctgtacctggtgacccggaacgccgacgttatccccgccagacggagaggcgacaagagaggagccctactttctccaagacctattagcaccctgaagggctctagcggaggtccagtgctttgtcctagaggacacgtggtgggactgttcagagccgccgtgtgcagcagaggcgtcgccaaatctattgattttatccctgtcgagacactggatgtggtgaccagatctcctacctttagcgacaacagcacccctccggcagtgccacagacctaccaagtgggctacctgcacgcccctaccggcagcggcaagagcaccaaggtgcccgtggcctatgccgcccaaggctacaaggtgctggtgctgaatccttctgtggccgctaccctgggcttcggcgcctatctgagcaaggcccacggaattaaccctaatatccggaccggagtgcggacagtgatgacaggggaagccatcacatacagcacctacggcaagttcctggccgacggcggatgtgccagcggtgcctacgacatcatcatctgcgacgagtgtcacgccgtcgatgctaccagtatcctgggcatcggcaccgtgctggaccaggccgagacagccggggtgcggctgaccgtcctggccaccgccacccctcccggctccgttactacaccccaccctgatatcgaggaagtgggcctgggcagagaaggcgagatccctttctacggcagagctatccccctgagctgcatcaagggaggacgccacctgatcttctgccacagcaagaagaaatgtgacgagctggccgctgccctgcggggcatgggcctgaacgccgtggcctactaccggggcctggacgtgagcatcatccccgcccagggcgacgtggtagtggtcgcaaccgacgctctgatgaccggctatacaggcgattttgacagcgtgatcgactgcaatgtggccgtgacccaggccgtggactttagcctggaccctaccttcaccatcaccacccagacagtgcctcaggatgctgtttccagaagccagaggagaggcagaacaggcagaggcagacagggcacataccgttacgtgtctacaggcgagagagccagcggcatgttcgattctgtggtgctgtgcgagtgctacgacgccggcgctgcatggtacgacctgacacctgctgaaacaaccgtgcggctgagagcctacttcaacacccctggcctccctgtttgtcaggaccacctggaattctgggaggccgtgttcaccggactcacccacatcgacgcgcatttcctgtcccaaaccaaacaggccggcgaaaacttcgcctacctggtcgcctaccaggcaaccgtctgcgctagagccaaagcccctcctccaagctgggatgccatgtggaagtgcctggcccggctgaagcccaccttggccggccccacccctctgctgtacagactgggacctatcaccaacgaggtgacactgacccatcctggcaccaagtacatcgccacctgcatgcaggctgacctggaagtgatgacctctggcggctcaaaacggacagccgacggaagcgagttcgagtcaccaaagaagaagcggaaagtctgataataggctgccttctgcggggcttgccttctggccatgcccttcttctctcccttgcacctgtacctcttggtctttgaataaagcctgagtaggaaggaccggtaaaaaaaaaaaaaaaaaaaaaaaaaaaaaaacgttgactaaaaaaaaaaaaaaaaaaaaaaaaaaaaaaaaaaaaaaaaaaaaaaaaaaaaaaaaaaaaaaaaaaaaaa

SEQ ID NO: 11802 - DNA, 7044 bp, synthetic construct
  source 1..7044: mol_type = other DNA
ggaaataagagagaaaagaagagtaagaagaaatataagagaattcgccaccatggctagctgccctaagcctggacctcctgtgtctgctggcgctatgagcctggagagcggacttaccacccactctgtgctggccatcgagagaggccccaactctctggccaactctggcagcgatttcggcggaggaggacttggcctgcctctgagacttctgagagtttctgtgggcacccagaccagcagaagcgactgggtcgaccttgtgagctggagccaccctggtcctacaagcaagagccagcaggtcgatctggtgagcctgttccccaagcacagagtcgacctgctgagcaagaacgaccaggtcgacttggtggcccagttcctgcctagcaagttccctcccaacctggctgagaacgacttagccctgctggtgaacctggagttctatcgttccgacctgcacgtgtacgagtgcgtgcacttcgctgcccattgggagggcttaagcggccttcctgaggtgtacgaacagctggctccccagccctgtgtaggcgagacattacacagcagcctgcccagagacagcgagctgttcgttccggaagagggctctagcgagaaggagagcgaggacgctcctaagaccagccctcctacccctggcaaacacggcctggagcaaacaggcgaggagaaggtcatggtgaccgtgcccgacaagaaccctccctgtccttgctgtggcacaagagtcaacagcgtgctgaacctcatcgagcacctgaaggtgtcccacggcaagagaggcgtgtgcttcagatgcgccaagtgcggcaaggagaacagcaactaccacagcgtcgtgtgccacttcaagaagtgcagaggccctgagaccgagaaggctcccgctggcgaatggatttgcgaggtgtgcaacagagacttcaccaccaagatcggcctgggccagcacaagcggttagctcaccctgctgtgagaaaccaggagagaatcgtggccagccagcccaaggagacaagcaacaggggcgctcacaagagatgctggaccaaggaggaagaggagctgctcatcagactggaggctcagttcgagggcaacaagaacatcaataagcttatcgccgagcacatcaccacaaagaccgccaagcagatcagcgacaagaggagactgctgtccagaaagcccgccgaggagcctagagaggaacctggtacatgtcaccacaccagaagagccgccgctagcctgagaaccgagcccgaaatgtctcaccacgctcaggccgaggacagagacaacggccctggcaggagacctcttcccggcagagctgctgctggaggcagaaccatggacgagatcaggagacaccccgataagggcaacggccagcagagacccacaaagcagaagtccgaggaacagctccaggcctactacaagaaaaccctggaggagagactgtccgcgggagctctgaacaccttccctagagccttcaaacaagtcatggagggcagagacatcaagctggtgatcaaccagaccgcccaggactgcttcggctgccttgagtctatcagccagatcaggaccgccacacgggataagaaggacaccgtcaccagagagaagcaccccaagaagcccttccagaaatggatgaagaagagggccatcaagaagggcaattacctgagattccagaggctgttctacctggacagaggcaagctggccaagatcatcctggacgacatcgagtgcctgagctgcgacatccctctgagcgagatctacagcgtgttcaagaccagatgggagaccaccggcagcttcaagtctctgggcgacttcaagacatacggcaaggccgacaacaccgccttcagagagctcatcaccgctaaggagatcgagaagaacgtgcaggagatgagcaagggcagcgctcctggccccgatggaattacactgggcgatgtggtgaagatggaccccgagttcagcagaacaatggagatcttcaacctgtggctcaccacaggcaagatccccgacatggtgagaggctgcagaaccgtgcttatccccaagagcagcaagcccgacagactgaaggatatcaacaactggagacccatcaccatcggcagcatcctgctgcggctgttcagccggattgtgaccgctagactgagcaaagcctgtcccctgaaccccagacagagaggcttcatcagagccgctggctgcagcgagaacctgaagctgctccagacaatcatctggagcgccaagagagagcacagacccctgggcgttgttttcgtggacatcgccaaggccttcgacaccgtgtcccatcagcacattatccacgccctgcagcagagggaggtcgaccctcatattgtgggcctggtgtccaacatgtacgagaacatctccacctatattacgaccaagagaaacacccacacagacaagatccagatccgggtcggcgtcaagcagggcgatcctatgtctcctctgctgttcaacctcgccatggaccctctgctctgcaagctcgaggagtctggaaagggctaccatagaggccaatcatcgatcaccgccatggccttcgccgacgacctggtgcttttaagcgacagctgggagaacatgaacaccaacatctctatcctggagacattctgcaaccttaccggcctgaaaacccagggccagaagtgtcatggcttctacatcaaacccaccaaggacagctacaccatcaacgactgcgccgcctggacaatcaacggcacccctctcaacatgatcgaccccggcgagtctgagaagtacctgggcctgcagttcgatccctggatcggcatcgctagaagcggcttgagcaccaagctggacttttggctccaacgcatagaccaggcccccctgaagcctcttcagaaaaccgacattttgaaaacttatacgatccccagactcatctacatcgccgaccactccgaggtcaagagcgctctgctggaaaccctggaccagaaaatcagaaccgccgtcaaggaatggctgcacctgcccccttgcacatgcgacgctatcctgtacagcagcaccagggacggcggcttaggaatcaccaagttagccggcctcatccccagcgtgcaggctaggagactccacagaatcgcccagagcagcgacgacaccatgaagtgcttcatggagaaggaaaagatggagcagctgcacaagaagctgtggatccaagcgggcggagatcgtgagaacattcccagcatctgggaggcccctcccagctcagaacctcccaataacgtgtccaccaattctgaatgggaggctcccacccagaaggataagtttcccaagccctgcaactggcggaagaacgagttcaaaaaatggacaaagctggctagccagggcaggggcatcgtgaacttcgaaagggacaagattagcaaccactggatccagtactacagaagaatcccccacagaaagctcctcaccgccctccagttacgtgcaaacgtgtacccaaccagagaattcctggccagaggcagacaggaccagtacatcaaggcctgccggcactgcgatgccgataacgagagctgtgctcacatcatcggcaactgccccgtcacccaggacgccagaatcaagagacacaactacatctgcgagttacttctggaggaagccaagaagaaggattgggttgtgttcaaggagccccacatcagagactccaacaaggagctgtacaagccagacctcatcttcgtgaaggacgctagagccctggtggtggacgtcaccgtcagatacgaggctgctaagtccagccttgaggaggctgccgccgagaaagtgcggaagtacaagcacctggaaacagaggtcagacacctcaccaacgccaaggacgttaccttcgtgggcttccccctaggtgctagaggcaaatggcaccaggacaacttcaagctgcttaccgagctgggcctctccaagagccgacaggttaagatggccgagaccttcagcaccgtcgccctgttctcttctgtggacattgtgcacatgttcgcctccagagccagaaagagcatggtgatgagcggctctgagacacctggaacaagcgagagcgccaccccggaactgttcgtggtccggccaggcagaaagaagaatgagctggaggccttcttcatcgaaaacgagcctgagaaacttagccagatgcaaaacctgaaagctgatagaatctacagattcatcatgcgagaaggcagactgtttaaggtgctggagggatctcagtaccgcaaccccaaggaaatcgagaagctcctgagacagagcagaatcgtgctggtgaacgccgacgagtgggaggactacttcaagagacggctgcagaacaaacgcgtggagaaagccgagctgtgtagactgtgtctgctggaagggaggatcaccgtgctgacagaaggcaatagaatcaagtaccacaacgagtacatctgcgagcggtgcgccgaggacgagctgaagcgggaactgagattccggttcaagtctatcgcaatgttcgaccaggccaagaagctgctggagagattccgggacctggacaaggtgctgtacgcctttgaccccagatttgatcctacaaagcaccctgagatcaccaagtgggacgagctgaaggccaaacatgtgaaggtggagaagatcaaggtggatgagctgcctgtaccagagaagttcaaggaagtgctgaagtccgagggcgtgagagagctgctgcctgtgcaaagcctggccgtgaaaaacggcctcctggacggcgagaacctgctcgtggtgtccgccacagccagcggcaagacactgattggagagctcgccggcgtgcccaaagccatgcagggcaaaaagctcctgtttttagtgcccctggtggcactggccaaccagaagtacgaggacttcaagaggcggtacagcaagctgggactgagagtcgctatccgggtgggcatgtctagaatcaagaccaaggacgagctggttgtggtggacaccggcatcgacgccgacatcattgtgggcacctacgagggaatcgactacctgctgcgggccggccggaaaatcggcaacgtgggaaccatcgtgatcgacgagatccacaccctggatgatgaagagagaggccctagactggatggcctgatcgccagactgcggaaactgtaccctaaggctcagttcatcggactgtccgctacagtgggcaatcctgatgaactggccaaggaacttggcctgaagctggttctctatgatgaaagacctgtggacctggagaggcacattatcatcgtgcgaaacgaatcagagaaatggcggcacatcgctaatctgtgcagagccgaagccatgcggaaatccaagcaaggctacaagggccagtctatcgtctttacattcagcagaaagcgaacccacgagctggcagcctacctgaccagcaagggcctgaaggccaaaccatatcacagcggcctgccttacaagcagcggaagctgaccgagatggaattcctggcccagagactggacgtggtggtgaccaccgccgccctgggcgccggagttgactttccagccagccaggtgatcttcgagagcctggctatgggcaacaagtggctgagcgtgcgggaattccaccagatgctgggcagagccggccggcctctgtaccatgaaaagggcaaggtgtacctgctggtcgagcccggcagaaaatacagcgcccagatggaaggaacagaggacgaggtggccttcaagctgttgacagctcctattgaacctgtgcaagtggaatggagcgacgaactggagcaggacaacgtgctggctcacagctgcgtgttcaacagactggacgtgatcgaggaggtgcagagcatgtgtctgggcgccaaccagtctgctgagaaggtgctggagaagctggaagaattcgactttgtgaagatgaaaagacccatcgtggaagtgaccccttacggcagggccgtgtccatgagcttcctgctgcccaaggaagccaccttcatcagaggcaacctgggaaagagagaggccagatggatcgctgtgaagctgctgcccttcgagaacatctatctgagcggaaccctgcagcgggaactggagggcgccgtgcgggggagactgagcgctaatgtgttcagcccaagcttcgcctccatcctggaagaactggataaggtgatccccgagctgagtcctaacgcggccgaacggctgttcacaatctaccaggagtttttcatgtgccctgaagaagattgcaccgagtacgctatggagagagtctctaatctgatcatcgagctacgcagaagcggcaagcaccctacccagatcgccgaacacttcagaaaggtgtacggccttattgtgtaccctggcgacgtgttcacctggctggacggcatcgttcggaaactagaggccatcgaaagaatcgcccgagtgtttagagtcagaaagaccgaggaaggagccaagatcctgaagagagagatcgaggagggccggatgatcagatctggcggctcaaaacggacagccgacggaagcgagttcgagtcaccaaagaagaagcggaaagtctgataataggctgccttctgcggggcttgccttctggccatgcccttcttctctcccttgcacctgtacctcttggtctttgaataaagcctgagtaggaaggaccggtaaaaaaaaaaaaaaaaaaaaaaaaaaaaaaacgttgactaaaaaaaaaaaaaaaaaaaaaaaaaaaaaaaaaaaaaaaaaaaaaaaaaaaaaaaaaaaaaaaaaaaaaa

SEQ ID NO: 11803 - DNA, 4280 bp, synthetic construct
  source 1..4280: mol_type = other DNA
gaaataagagagaaaagaagagtaagaagaaatataagagaattcgccaccatggccccacggtctgacgggggcaccgggtcgggaagtgggctgaccacccaccccgcacctgagagtgaatctggtcatgactcaactgtcccaaatcctggtccagtccttgcagcgggggacggtgctcgaccggtacttttggtatcagtgggcacccaaacctgcaaagaggactttataacatctagaccaaccaaattgataggaaatgaatcagaattaggcttgctggtgaatttttcattagaggtgtatagatcagatctgaaaggggatgtgcaatttgagggggttcattttccagataattggggggtactggacgggtttcctgaggtgtatgaacaacttgcaccacaaacaggagagggagacgggttaaaacctagtctccagggggacagtgagggagatgtacttgagaaaggtagcagcgagaaggggaaggagaaggagaaggaaaaggagggggagaaggagaaggaggttacaccagaggcattacccccaaagcggaaggcccacagcgagcagtcacaggataacatcgtaaaagtgactgttcctgacaaaaatccaccctgtccttgctgtggtgtccggttgaactcggttttggccctgattgaacatctcaagggccacgggaagaggagggtatgctttaggtgtgccaaatgtgggagggagaattttaaccatcatagtactgtttgtcatttcgcgaagtgtaaaggtccacagactgaaaggccaccagtgggagagtggatctgtgaggtatgcggaagggatttcacgaccaaaattggcctgggacaacacaaaagacatatgcatgcaatggagagaaatcaggaaaggatcgatgcttcccaaccgaaagaaacgtcaaaccgaggagcccacaagaggtgctggacgaaggaagaggaggaactactcatgaaattggaggtacagtttgaaagtcacaaaaacattaataaactcattgcggaacacttaacaactaaaacagctaaacaaattagtgataaaaggagaatgctgctcaagaaagggagggtgacagctggaaatttagattcggagcctgggatgaatcatcaacctcaggcagaagtcaaggacaatgaacttggggggtgtcatctgcccggggggccagctgttgataaagggacaatagggaaattaggacaacatcttgaatcgggtaacggtcaccaggaaactgctggtcaaaagaaggagaggggactgcaggcccgttatagaaggagaattatgaagcgattagcggccgggacaattaacatcttccccaaagtatttaaagaactgctgaactgccaggaggcgagaccgctaatcaaccaaacaacagaggaatgctttggcctcctggactctgcatgccaaattagaacggcactccgggacaagggcagggcacaggaggagcgaccaaggaaacagtatcagaagtggatgaaagaaagagcgattaaaagaggtaactacctccgcttccagcgattattccatctagacagggggaaattggcaagaattattttggacaacactgagagcttgtcctgcgaaataccacccagtgaaatctattcggtattcaaggccagatgggaaacacctggacagtttaacggccttggggactttgaaattaaagggaaggccaacaataaagccttcagggacttaatcacggcaaaagaaattgaaaagaacgtgcgggaaatgagtaagggttcagcgccaggtccagatgggattgcccttggggacatcagaaagatggatcccgggtattcccggaccgccgaactcttcaacttgtggctgacatctggtgacatcccggacatggtgagggggtgcagaactgttttgatcccgaaatcgacaacaccggagcgcctgaaggacatcaataactggagacccatcacgattggttccatcttgctgaggctgttctccaggatcataacggcgaggatgactaaggcgtgccccctcaacccgagacagagaggcttcatcagtgcgccgggatgctctgagaacctgaaactcctgcaatctataattcggactgccaaaagtgaacacaggccactgggtgttattttcgtggacattgccaaggcttttgacaccgtaagccaccaacacatcatacatgttttacagcaacggagggttgacccccacattgtaggactggtgaacaatatgtacaacgacatcagtacacgtatcaccacgaagaaggacacacacacagacaaaatccagatccgggttggagtgaagcagggtgatccactgtcaccccttctattcaacctggcaatggaccccctgctgtgcaagctggaagaaagtggcaaaggattccatcgaggacagagttcaataaccgcgatggcattcgctgacgacctggttctgttgagcgactcctgggagaacatgaaagagaacatcagaatactggagaccttctgcgatctcaccggtctcaagacacaggggcagaaatgccacggcttctacatcaagcccacaaaagactcttacaccgtcaataactgccctgcgtggaccatcaatggcacacccctgaacatgatcaaccccggggagtcagagaagtacctcggcctgcagatcgacccatggactggaatagcaaagtacgatctctccacaaaactgaaagcctggctcgaaagcatcgatcgggctccactcaaacctctgcaaaaactcgacatcctcaaaacatacactattcctcgactgacctacctggctgaccattcggagatgaaggcaggggctttggaagcacttgaccaacagattcggacggcggtcaaggactggctgcacttaccctcgtgcacctgtgatgccatcttgtacgtaagcacgagggacggcgggttgggtgtcactaaattggcgggtctcattcccagtgtacaagcccggaggctgcaccgcattgcgcagtcaccggaccagacgatgaaggacttcttagagaaggcccagatggagaaaatgtatgagaagttatggattcaagctggaggtaaaaagaaggggatgccgtcaatttgggaagccccgccggcgactgtaccacctgtcaatgcaggcacactttcggagtgggaagcaccgaaccctaaaagtaggtacccaaaaccttgtgattggaggagaaaagaacttaaaaagtggacgaaattagagtcccaaggtcgtggagttaaaaattttaggaacgatactattagtaacgattggattcaatgttatagacgcatacctcacaggaagctcctcactgctatacaactcagggccaatgtgtatcccacgagggaattcctcgggcgggggaggggagatgactgtgttaagttttgcagacactgcgagatggaccttgaatcctgtggccacatcatcggcttttgcccagtaacgaaggacgcccggatcaagaggcacaatcgcatctgcgacaggctctgtgacgaggcgatcaagagagactgggtggtgttcaaggaaccgcacttgaaggatgccaccagggaactgttcaaaccggacctgatatttgtgaaggagggccgagcactggttgtggatgtgacagtacggtacgaagcagcaaagacaacgctggaggcagctgctgcggagaaagttgacaagtacaaacatttggagcccgaagtgaagagcctcaccaacgctacggacgttgtttttatggggttcccccttggagcgcgggggaagttttacaaagggaactttgatttgcttgagactcttggcctcccaaaaacgaggcagataagtgtggcaaagactctgtccacgtacgcgctcacgtcatctgtggacattgtgcacatgtttgttagtaaggctagaaaatctaatgtctgataataggctgccttctgcggggcttgccttctggccatgcccttcttctctcccttgcacctgtacctcttggtctttgaataaagcctgagtaggaaggaccggtaaaaaaaaaaaaaaaaaaaaaaaaaaaaaaacgttgactaaaaaaaaaaaaaaaaaaaaaaaaaaaaaaaaaaaaaaaaaaaaaaaaaaaaaaaaaaaaaaaaaaaaaa

SEQ ID NO: 11804-11805 - skipped (2 entries)

SEQ ID NO: 11806 - DNA, 5144 bp, synthetic construct
  source 1..5144: mol_type = other DNA
gaaataagagagaaaagaagagtaagaagaaatataagagaattcgccaccatggcccctaagaaaaagcggaaggtgaatatcagcggctctagctgcggcagccccaacagcgccgacaccagcagcgacttcaaggacctgtggaccaagctgaaggaatgccacgaccgggaagtgcagggactccaggtgaaggtcaccaaactcaagcaagaaagaatcctggacgcccagagactggaagaattcttcaccaagaaccagcagctgagagagcagcagaaagtgctgcacgagacaatcaaggttctggaagatagactgcgggccggcctgtgcgacagatgcgccgtgaccgaggaacacatgcgcaaaaagcagcaggagttcgagaacattagacagcaaaatctgaaattgatcacagagctgatgaacgagagaaacacactgcaggaggagaacaagaagctgagcgagcagctgcaacagaagatcgagaatgatcagcaacaccaggccgctgagctggaatgtgaagaggacgtgatccccgacagcccaatcacagctttcagcttttctggcgtgaacagactgaggcggaaggaaaacccccacgtgcggtacatcgagcagacccataccaagctggaacacagcgtgtgtgccaacgagatgagaaaggtgtccaagtcctccacccatccccagcacaaccctaacgaaaatgagatcctggtggctgatacctacgaccagtctcagagccctatggccaaggcccacggcaccagctcttatacccctgataagagctccttcaacctggccaccgtggtggccgagacactgggcctgggcgtgcaggaggaaagcgagacacagggcccaatgagccctctgggagatgagctgtaccactgcctggaaggcaaccacaagaaacagccttttgagtccggctccgagactcctggaacaagcgagagcgctacacctgagggcagcgtgaccgtgaagttcaagtacaagggcgaggaaaaggaagtggacatcagcaagatcaagaaggtctggcgggtgggcaagatgatcagctttacctacgacgataacggcaagacaggcagaggcgccgtgtccgagaaggacgcccctaaagagctgctgcagatgctggaaaaaagcggctctgagacacctggaacaagcgagagcgccaccccggaatcctatgaacaacttgcaccacaaccgtgtgtgggagaaactttacattctagcctcccacgagacagtgaactgtttgtgcctgaagaggggagcagcgagaaggagagcgaggacgcgccaaaaacatctcctccgacgcctgggaaacatggtttggaacagactggggaggaaaaagtgatggtgactgttcctgacaaaaatccaccttgtccttgctgtggtacccgggtaaactctgtgttgaatctgattgaacatctgaaagtgtcacacgggaaaaggggggtttgttttcggtgtgcaaaatgtggaaaggaaaatagtaactatcacagtgttgtttgtcattttaagaaatgcaggggtccagagacggagaaagccccagctggggagtggatttgtgaggtatgcaacagagattttacaaccaaaattggcctgggacaacacaagagattggcacacccagcagtgagaaatcaggaaaggatcgttgcttcccaaccgaaagaaacatcaaatagaggtgctcacaaaaggtgctggacaaaggaggaggaagaattactaataagactggaggctcagttcgagggaaacaaaaatattaataagcttattgcagaacacataaccaccaaaacagctaagcagatcagtgacaaaaggcgattgctgtccagaaagccagcagaggagccacgtgaggagcctggaacgtgtcatcacaccaggagagcagctgcgagcctgagaacggagcctgagatgagtcatcacgcccaggcagaggacagagataatggacctgggagacgccctctgccaggcagggcagctgccggagggagaacaatggacgagataagacgccaccctgataagggcaacggacagcagagacccaccaagcaaaaatcagaagaacagctgcaggcttactataaaaagacactagaggaacgactttcagctggggcacttaacaccttcccccgagcattcaagcaggtaatggaaggccgggatataaagctagtaatcaatcagacagcgcaggactacttcggatgcctggaatccataagccaaataagaacggcaacccgagataaaaaggacacggtgacccgggagaaacacccaaagaaaccttttcagaagtggatgaagaagagagcaatcaaaaaaggtaattatcttcggttccagcgtttattttatcttgatagagggaaactggctaaaatcattttagatgatattgaatgcttgtcttgtgacataccactcagtgaaatttattcggtttttaaaacaagatgggaaacaactggtagctttaaaagccttggggactttaaaacttacgggaaggctgacaacactgccttcagagaattaattacggctaaagaaattgagaaaaatgtgcaggaaatgagcaaaggctcggctcccggtccagacgggattactcttggggacgtcgtaaagatggatcccgagttttcccggaccatggagattttcaatttatggttaacaactggtaaaatcccggacatggtgagggggtgcagaaccgttttgattccaaaatcatcaaagccggatcgtttgaaagacattaataactggagacctatcacgatcggttccatcttgctgagactgttctccaggattgtaacagctaggctgagcaaagcgtgccccctgaacccaaggcaaagaggctttatcagagcggcgggatgctctgaaaacttaaaactcctgcaaactataatttggtcggccaaaagagaacacagaccactgggtgttgtattcgtggacatcgccaaggcttttgacaccgtaagccaccagcacatcattcatgctttgcagcaaagagaggtggatccccacatcgtcggtctggtgagcaatatgtacgagaacatcagtacgtatatcaccacaaagaggaacacacacacagacaaaatccagatccgggttggagtaaagcagggtgacccgatgtcgccccttttatttaacctggcaatggaccctctattatgcaagctggaagagagtggcaaaggataccaccgaggacagagcagcatcacagcgatggcatttgcagacgatctggttttgctgagcgactcctgggaaaatatgaatacaaatattagcatactggagaccttctgcaatctgaccggactcaaaacacaggggcaaaagtgccacggcttttacatcaagccgacaaagaagtcttacaccatcaatgactgcgctgcctggactatcaacggcacacccctgaacatgatcgaccccggcgaatctgagaaatacctcggcctgcagtttgacccgtggattggaatagcaaggtccggtctctccacaaaactagatttttggcttcagcggatcgatcaagcaccacttaaacctctgcagaaaactgatattctcaaaacatacaccatccctcggctgatctacatagctgaccactcagaagtgaaaagcgcactactcgaaacccttgaccagaagatccggacagcggtcaaggaatggcttcacctacctccgtgcacctgcgatgccatcctgtactcgagcacgagagacggcggtttgggcatcaccaaattggcaggactgatccccagcgtgcaggcccgtagactgcatcggatcgcacagtcatctgacgatacgatgaaatgcttcatggaaaaagagaaaatggaacagctgcataagaaattgtggattcaagctggaggggacagagagaacataccctcgatttgggaagcaccaccgtcgagtgaaccaccaaacaacgtgagcacaaattcggaatgggaagcaccgacccagaaagataaatttccaaagccttgcaattggaggaaaaacgaattcaaaaaatggaccaaattggcatcccaaggccgcggaattgtaaattttgaaagagacaaaattagtaaccattggatccaatactacagacgcatacctcacaggaaactcctcactgcactacaactcagggccaacgtttaccccacgagagaatttctagccaggggtagacaagaccaatacatcaaggcgtgtaggcactgcgatgcggacaacgaatcctgcgcccacatcatcggcaactgcccagtgacacaggacgcccgaatcaagaggcacaattacatctgcgaactgcttctcgaggaggcgaagaagaaggactgggtagtgttcaaggaaccgcacataagggattccaacaaggaactgtacaaacctgacctgatatttgtgaaggatgggcgtgcacttgtcgtggatgtgacagtacggtatgaagcagccaaatcatcgctggaggaagccgctgcagagaaagtgagaaagtacaaacacctggaaacggaagtaagacatctcacgaatgcaaaggacgttacttttgtgggctttcccctaggagcgcgggggaaatggcaccaagataactttaaacttttgactgagcttggcctctccaaatcgaggcaagtgaaaatggcagagactttttccacagtagcgctcttttcatctgtggacattgtacatatgtttgccagtagggccagaaaatctatggttatgtgataataggctgccttctgcggggcttgccttctggccatgcccttcttctctcccttgcacctgtacctcttggtctttgaataaagcctgagtaggaaggaccggtaaaaaaaaaaaaaaaaaaaaaaaaaaaaaaacgttgactaaaaaaaaaaaaaaaaaaaaaaaaaaaaaaaaaaaaaaaaaaaaaaaaaaaaaaaaaaaaaaaaaaaaaa

SEQ ID NO: 11807 - DNA, 4484 bp, synthetic construct
  source 1..4484: mol_type = other DNA
gaaataagagagaaaagaagagtaagaagaaatataagagaattcgccaccatggcccctaagaaaaagagaaaggtggtgaccgtgaagttcaagtacaagggcgaggaaaaggaagtggacatcagcaagatcaagaaggtctggcgggtgggcaagatgatcagctttacctacgacgataacggcaagacaggcagaggcgccgtgtccgagaaggacgcccctaaagagctgctgcagatgctggaaaaaagcggctctgagacacctggaacaagcgagagcgccaccccggaatcccctaagagaaaggtgtccagcgccgagggcgctgccaaggaagagcctaaacggagaagcgccagactgagcgccaagccccccgccaaggtggaagccaagcctaagaaggccgccgctaaggacaagagcagcgataagaaagtccagaccaagggcaagcggggcgccaaaggcaaacaggccgaggtggccaaccaggagacaaaggaagatctgcctgctgagaacggcgaaaccaagaccgaggaatctccagcttctgacgaggccggagagaaggaggccaaaagcgacagcggctctgagacacctggaacaagcgagagcgccaccccggaatccctgtttgtgcctgaagaggggagcagcgagaaggagagcgaggacgcgccaaaaacatctcctccgacgcctgggaaacatggtttggaacagactggggaggaaaaagtgatggtgactgttcctgacaaaaatccaccttgtccttgctgtggtacccgggtaaactctgtgttgaatctgattgaacatctgaaagtgtcacacgggaaaaggggggtttgttttcggtgtgcaaaatgtggaaaggaaaatagtaactatcacagtgttgtttgtcattttaagaaatgcaggggtccagagacggagaaagccccagctggggagtggatttgtgaggtatgcaacagagattttacaaccaaaattggcctgggacaacacaagagattggcacacccagcagtgagaaatcaggaaaggatcgttgcttcccaaccgaaagaaacatcaaatagaggtgctcacaaaaggtgctggacaaaggaggaggaagaattactaataagactggaggctcagttcgagggaaacaaaaatattaataagcttattgcagaacacataaccaccaaaacagctaagcagatcagtgacaaaaggcgattgctgtccagaaagccagcagaggagccacgtgaggagcctggaacgtgtcatcacaccaggagagcagctgcgagcctgagaacggagcctgagatgagtcatcacgcccaggcagaggacagagataatggacctgggagacgccctctgccaggcagggcagctgccggagggagaacaatggacgagataagacgccaccctgataagggcaacggacagcagagacccaccaagcaaaaatcagaagaacagctgcaggcttactataaaaagacactagaggaacgactttcagctggggcacttaacaccttcccccgagcattcaagcaggtaatggaaggccgggatataaagctagtaatcaatcagacagcgcaggactacttcggatgcctggaatccataagccaaataagaacggcaacccgagataaaaaggacacggtgacccgggagaaacacccaaagaaaccttttcagaagtggatgaagaagagagcaatcaaaaaaggtaattatcttcggttccagcgtttattttatcttgatagagggaaactggctaaaatcattttagatgatattgaatgcttgtcttgtgacataccactcagtgaaatttattcggtttttaaaacaagatgggaaacaactggtagctttaaaagccttggggactttaaaacttacgggaaggctgacaacactgccttcagagaattaattacggctaaagaaattgagaaaaatgtgcaggaaatgagcaaaggctcggctcccggtccagacgggattactcttggggacgtcgtaaagatggatcccgagttttcccggaccatggagattttcaatttatggttaacaactggtaaaatcccggacatggtgagggggtgcagaaccgttttgattccaaaatcatcaaagccggatcgtttgaaagacattaataactggagacctatcacgatcggttccatcttgctgagactgttctccaggattgtaacagctaggctgagcaaagcgtgccccctgaacccaaggcaaagaggctttatcagagcggcgggatgctctgaaaacttaaaactcctgcaaactataatttggtcggccaaaagagaacacagaccactgggtgttgtattcgtggacatcgccaaggcttttgacaccgtaagccaccagcacatcattcatgctttgcagcaaagagaggtggatccccacatcgtcggtctggtgagcaatatgtacgagaacatcagtacgtatatcaccacaaagaggaacacacacacagacaaaatccagatccgggttggagtaaagcagggtgacccgatgtcgccccttttatttaacctggcaatggaccctctattatgcaagctggaagagagtggcaaaggataccaccgaggacagagcagcatcacagcgatggcatttgcagacgatctggttttgctgagcgactcctgggaaggcatgaatacaaatattagcatactggagaccttctgcaatctgaccggactcaaaacacaggggcaaaagtgccacggcttttacatcaagccgacaaaggactcttacaccatcaatgactgcgctgcctggactatcaacggcacacccctgaacatgatcgaccccggcgaatctgagaaatacctcggcctgcagtttgacccgtggattggaatagcaaggtccggtctctccacaaaactagatttttggcttcagcggatcgatcaagcaccacttaaacctctgcagaaaactgatattctcaaaacatacaccatccctcggctgatctacatagctgaccactcagaagtgaaaagcgcactactcgaaacccttgaccagaagatccggacagcggtcaaggaatggcttcacctacctccgtgcacctgcgatgccatcctgtactcgagcacgagagacggcggtttgggcatcaccaaattggcaggactgatccccagcgtgcaggcccgtagactgcatcggatcgcacagtcatctgacgatacgatgaaatgcttcatggaaaaagagaaaatggaacagctgcataagaaattgtggattcaagctggaggggacagagagaacataccctcgatttgggaagcaccaccgtcgagtgaaccaccaaacaacgtgagcacaaattcggaatgggaagcaccgacccagaaagataaatttccaaagccttgcaattggaggaaaaacgaattcaaaaaatggaccaaattggcatcccaaggccgcggaattgtaaattttgaaagagacaaaattagtaaccattggatccaatactacagacgcatacctcacaggaaactcctcactgcactacaactcagggccaacgtttaccccacgagagaatttctagccaggggtagacaagaccaatacatcaaggcgtgtaggcactgcgatgcggacaacgaatcctgcgcccacatcatcggcaactgcccagtgacacaggacgcccgaatcaagaggcacaattacatctgcgaactgcttctcgaggaggcgaagaagaaggactgggtagtgttcaaggaaccgcacataagggattccaacaaggaactgtacaaacctgacctgatatttgtgaaggatgggcgtgcacttgtcgtggatgtgacagtacggtatgaagcagccaaatcatcgctggaggaagccgctgcagagaaagtgagaaagtacaaacacctggaaacggaagtaagacatctcacgaatgcaaaggacgttacttttgtgggctttcccctaggagcgcgggggaaatggcaccaagataactttaaacttttgactgagcttggcctctccaaatcgaggcaagtgaaaatggcagagactttttccacagtagcgctcttttcatctgtggacattgtacatatgtttgccagtagggccagaaaatctatggttatgtgataataggctgccttctgcggggcttgccttctggccatgcccttcttctctcccttgcacctgtacctcttggtctttgaataaagcctgagtaggaaggaccggtaaaaaaaaaaaaaaaaaaaaaaaaaaaaaaacgttgactaaaaaaaaaaaaaaaaaaaaaaaaaaaaaaaaaaaaaaaaaaaaaaaaaaaaaaaaaaaaaaaaaaaaaa

SEQ ID NO: 11808 - DNA, 5144 bp, synthetic construct
  source 1..5144: mol_type = other DNA
gaaataagagagaaaagaagagtaagaagaaatataagagaattcgccaccatggcccctaagaaaaagagaaaggtggtgaccgtgaagttcaagtacaagggcgaggaaaaggaagtggacatcagcaagatcaagaaggtctggcgggtgggcaagatgatcagctttacctacgacgataacggcaagacaggcagaggcgccgtgtccgagaaggacgcccctaaagagctgctgcagatgctggaaaaaagcggctctgagacacctggaacaagcgagagcgccaccccggaatccaatatcagcggctctagctgcggcagccccaacagcgccgacaccagcagcgacttcaaggacctgtggaccaagctgaaggaatgccacgaccgggaagtgcagggactccaggtgaaggtcaccaaactcaagcaagaaagaatcctggacgcccagagactggaagaattcttcaccaagaaccagcagctgagagagcagcagaaagtgctgcacgagacaatcaaggttctggaagatagactgcgggccggcctgtgcgacagatgcgccgtgaccgaggaacacatgcgcaaaaagcagcaggagttcgagaacattagacagcaaaatctgaaattgatcacagagctgatgaacgagagaaacacactgcaggaggagaacaagaagctgagcgagcagctgcaacagaagatcgagaatgatcagcaacaccaggccgctgagctggaatgtgaagaggacgtgatccccgacagcccaatcacagctttcagcttttctggcgtgaacagactgaggcggaaggaaaacccccacgtgcggtacatcgagcagacccataccaagctggaacacagcgtgtgtgccaacgagatgagaaaggtgtccaagtcctccacccatccccagcacaaccctaacgaaaatgagatcctggtggctgatacctacgaccagtctcagagccctatggccaaggcccacggcaccagctcttatacccctgataagagctccttcaacctggccaccgtggtggccgagacactgggcctgggcgtgcaggaggaaagcgagacacagggcccaatgagccctctgggagatgagctgtaccactgcctggaaggcaaccacaagaaacagccttttgagtccggctccgagactcctggaacaagcgagagcgctacacctgagggcagctatgaacaacttgcaccacaaccgtgtgtgggagaaactttacattctagcctcccacgagacagtgaactgtttgtgcctgaagaggggagcagcgagaaggagagcgaggacgcgccaaaaacatctcctccgacgcctgggaaacatggtttggaacagactggggaggaaaaagtgatggtgactgttcctgacaaaaatccaccttgtccttgctgtggtacccgggtaaactctgtgttgaatctgattgaacatctgaaagtgtcacacgggaaaaggggggtttgttttcggtgtgcaaaatgtggaaaggaaaatagtaactatcacagtgttgtttgtcattttaagaaatgcaggggtccagagacggagaaagccccagctggggagtggatttgtgaggtatgcaacagagattttacaaccaaaattggcctgggacaacacaagagattggcacacccagcagtgagaaatcaggaaaggatcgttgcttcccaaccgaaagaaacatcaaatagaggtgctcacaaaaggtgctggacaaaggaggaggaagaattactaataagactggaggctcagttcgagggaaacaaaaatattaataagcttattgcagaacacataaccaccaaaacagctaagcagatcagtgacaaaaggcgattgctgtccagaaagccagcagaggagccacgtgaggagcctggaacgtgtcatcacaccaggagagcagctgcgagcctgagaacggagcctgagatgagtcatcacgcccaggcagaggacagagataatggacctgggagacgccctctgccaggcagggcagctgccggagggagaacaatggacgagataagacgccaccctgataagggcaacggacagcagagacccaccaagcaaaaatcagaagaacagctgcaggcttactataaaaagacactagaggaacgactttcagctggggcacttaacaccttcccccgagcattcaagcaggtaatggaaggccgggatataaagctagtaatcaatcagacagcgcaggactacttcggatgcctggaatccataagccaaataagaacggcaacccgagataaaaaggacacggtgacccgggagaaacacccaaagaaaccttttcagaagtggatgaagaagagagcaatcaaaaaaggtaattatcttcggttccagcgtttattttatcttgatagagggaaactggctaaaatcattttagatgatattgaatgcttgtcttgtgacataccactcagtgaaatttattcggtttttaaaacaagatgggaaacaactggtagctttaaaagccttggggactttaaaacttacgggaaggctgacaacactgccttcagagaattaattacggctaaagaaattgagaaaaatgtgcaggaaatgagcaaaggctcggctcccggtccagacgggattactcttggggacgtcgtaaagatggatcccgagttttcccggaccatggagattttcaatttatggttaacaactggtaaaatcccggacatggtgagggggtgcagaaccgttttgattccaaaatcatcaaagccggatcgtttgaaagacattaataactggagacctatcacgatcggttccatcttgctgagactgttctccaggattgtaacagctaggctgagcaaagcgtgccccctgaacccaaggcaaagaggctttatcagagcggcgggatgctctgaaaacttaaaactcctgcaaactataatttggtcggccaaaagagaacacagaccactgggtgttgtattcgtggacatcgccaaggcttttgacaccgtaagccaccagcacatcattcatgctttgcagcaaagagaggtggatccccacatcgtcggtctggtgagcaatatgtacgagaacatcagtacgtatatcaccacaaagaggaacacacacacagacaaaatccagatccgggttggagtaaagcagggtgacccgatgtcgccccttttatttaacctggcaatggaccctctattatgcaagctggaagagagtggcaaaggataccaccgaggacagagcagcatcacagcgatggcatttgcagacgatctggttttgctgagcgactcctgggaaggcatgaatacaaatattagcatactggagaccttctgcaatctgaccggactcaaaacacaggggcaaaagtgccacggcttttacatcaagccgacaaaggactcttacaccatcaatgactgcgctgcctggactatcaacggcacacccctgaacatgatcgaccccggcgaatctgagaaatacctcggcctgcagtttgacccgtggattggaatagcaaggtccggtctctccacaaaactagatttttggcttcagcggatcgatcaagcaccacttaaacctctgcagaaaactgatattctcaaaacatacaccatccctcggctgatctacatagctgaccactcagaagtgaaaagcgcactactcgaaacccttgaccagaagatccggacagcggtcaaggaatggcttcacctacctccgtgcacctgcgatgccatcctgtactcgagcacgagagacggcggtttgggcatcaccaaattggcaggactgatccccagcgtgcaggcccgtagactgcatcggatcgcacagtcatctgacgatacgatgaaatgcttcatggaaaaagagaaaatggaacagctgcataagaaattgtggattcaagctggaggggacagagagaacataccctcgatttgggaagcaccaccgtcgagtgaaccaccaaacaacgtgagcacaaattcggaatgggaagcaccgacccagaaagataaatttccaaagccttgcaattggaggaaaaacgaattcaaaaaatggaccaaattggcatcccaaggccgcggaattgtaaattttgaaagagacaaaattagtaaccattggatccaatactacagacgcatacctcacaggaaactcctcactgcactacaactcagggccaacgtttaccccacgagagaatttctagccaggggtagacaagaccaatacatcaaggcgtgtaggcactgcgatgcggacaacgaatcctgcgcccacatcatcggcaactgcccagtgacacaggacgcccgaatcaagaggcacaattacatctgcgaactgcttctcgaggaggcgaagaagaaggactgggtagtgttcaaggaaccgcacataagggattccaacaaggaactgtacaaacctgacctgatatttgtgaaggatgggcgtgcacttgtcgtggatgtgacagtacggtatgaagcagccaaatcatcgctggaggaagccgctgcagagaaagtgagaaagtacaaacacctggaaacggaagtaagacatctcacgaatgcaaaggacgttacttttgtgggctttcccctaggagcgcgggggaaatggcaccaagataactttaaacttttgactgagcttggcctctccaaatcgaggcaagtgaaaatggcagagactttttccacagtagcgctcttttcatctgtggacattgtacatatgtttgccagtagggccagaaaatctatggttatgtgataataggctgccttctgcggggcttgccttctggccatgcccttcttctctcccttgcacctgtacctcttggtctttgaataaagcctgagtaggaaggaccggtaaaaaaaaaaaaaaaaaaaaaaaaaaaaaaacgttgactaaaaaaaaaaaaaaaaaaaaaaaaaaaaaaaaaaaaaaaaaaaaaaaaaaaaaaaaaaaaaaaaaaaaaa

SEQ ID NO: 11809 - DNA, 4460 bp, synthetic construct
  source 1..4460: mol_type = other DNA
gaaataagagagaaaagaagagtaagaagaaatataagagaattcgccaccatgcctaagagaaaggtgtccagcgccgagggcgctgccaaggaagagcctaaacggagaagcgccagactgagcgccaagccccccgccaaggtggaagccaagcctaagaaggccgccgctaaggacaagagcagcgataagaaagtccagaccaagggcaagcggggcgccaaaggcaaacaggccgaggtggccaaccaggagacaaaggaagatctgcctgctgagaacggcgaaaccaagaccgaggaatctccagcttctgacgaggccggagagaaggaggccaaaagcgacagcggctctgagacacctggaacaagcgagagcgccaccccggaatccgtgaccgtgaagttcaagtacaagggcgaggaaaaggaagtggacatcagcaagatcaagaaggtctggcgggtgggcaagatgatcagctttacctacgacgataacggcaagacaggcagaggcgccgtgtccgagaaggacgcccctaaagagctgctgcagatgctggaaaaaagcggctctgagacacctggaacaagcgagagcgccaccccggaatccctgtttgtgcctgaagaggggagcagcgagaaggagagcgaggacgcgccaaaaacatctcctccgacgcctgggaaacatggtttggaacagactggggaggaaaaagtgatggtgactgttcctgacaaaaatccaccttgtccttgctgtggtacccgggtaaactctgtgttgaatctgattgaacatctgaaagtgtcacacgggaaaaggggggtttgttttcggtgtgcaaaatgtggaaaggaaaatagtaactatcacagtgttgtttgtcattttaagaaatgcaggggtccagagacggagaaagccccagctggggagtggatttgtgaggtatgcaacagagattttacaaccaaaattggcctgggacaacacaagagattggcacacccagcagtgagaaatcaggaaaggatcgttgcttcccaaccgaaagaaacatcaaatagaggtgctcacaaaaggtgctggacaaaggaggaggaagaattactaataagactggaggctcagttcgagggaaacaaaaatattaataagcttattgcagaacacataaccaccaaaacagctaagcagatcagtgacaaaaggcgattgctgtccagaaagccagcagaggagccacgtgaggagcctggaacgtgtcatcacaccaggagagcagctgcgagcctgagaacggagcctgagatgagtcatcacgcccaggcagaggacagagataatggacctgggagacgccctctgccaggcagggcagctgccggagggagaacaatggacgagataagacgccaccctgataagggcaacggacagcagagacccaccaagcaaaaatcagaagaacagctgcaggcttactataaaaagacactagaggaacgactttcagctggggcacttaacaccttcccccgagcattcaagcaggtaatggaaggccgggatataaagctagtaatcaatcagacagcgcaggactgcttcggatgcctggaatccataagccaaataagaacggcaacccgagataaaaaggacacggtgacccgggagaaacacccaaagaaaccttttcagaagtggatgaagaagagagcaatcaaaaaaggtaattatcttcggttccagcgtttattttatcttgatagagggaaactggctaaaatcattttagatgatattgaatgcttgtcttgtgacataccactcagtgaaatttattcggtttttaaaacaagatgggaaacaactggtagctttaaaagccttggggactttaaaacttacgggaaggctgacaacactgccttcagagaattaattacggctaaagaaattgagaaaaatgtgcaggaaatgagcaaaggctcggctcccggtccagacgggattactcttggggacgtcaagaagatggatcccgagttttcccggaccatggagattttcaatttatggttaacaactggtaaaatcccggacatggtgagggggtgcagaaccgttttgattccaaaatcatcaaagccggatcgtttgaaagacattaataactggagacctatcacgatcggttccatcttgctgagactgttctccaggattgtaacagctaggctgagcaaagcgtgccccctgaacccaaggcaaagaggctttatcagagcggcgggatgctctgaaaacttaaaactcctgcaaactataatttggtcggccaaaagagaacacagaccactgggtgttgtattcgtggacatcgccaaggcttttgacaccgtaagccaccagcacatcattcatgctttgcagcaaagagaggtggatccccacatcgtcggtctggtgagcaatatgtacgagaacatcagtacgtatatcaccacaaagaggaacacacacacagacaaaatccagatccgggttggagtaaagcagggtgacccgatgtcgccccttttatttaacctggcaatggaccctctattatgcaagctggaagagagtggcaaaggataccaccgaggacagagcagcatcacagcgatggcatttgcagacgatctggttttgctgagcgactcctgggaaaatatgaatacaaatattagcatactggagaccttctgcaatctgaccggactcaaaacacaggggcaaaagtgccacggcttttacatcaagccgacaaaggactcttacaccatcaatgactgcgctgcctggactatcaacggcacacccctgaacatgatcgaccccggcgaatctgagaaatacctcggcctgcagtttgacccgtggattggaatagcaaggtccggtctctccacaaaactagatttttggcttcagcggatcgatcaagcaccacttaaacctctgcagaaaactgatattctcaaaacatacaccatccctcggctgatctacatagctgaccactcagaagtgaaaagcgcactactcgaaacccttgaccagaagatccggacagcggtcaaggaatggcttcacctacctccgtgcacctgcgatgccatcctgtactcgagcacgagagacggcggtttgggcatcaccaaattggcaggactgatccccagcgtgcaggcccgtagactgcatcggatcgcacagtcatctgacgatacgatgaaatgcttcatggaaaaagagaaaatggaacagctgcataagaaattgtggattcaagctggaggggacagagagaacataccctcgatttgggaagcaccaccgtcgagtgaaccaccaaacaacgtgagcacaaattcggaatgggaagcaccgacccagaaagataaatttccaaagccttgcaattggaggaaaaacgaattcaaaaaatggaccaaattggcatcccaaggccgcggaattgtaaattttgaaagagacaaaattagtaaccattggatccaatactacagacgcatacctcacaggaaactcctcactgcactacaactcagggccaacgtttaccccacgagagaatttctagccaggggtagacaagaccaatacatcaaggcgtgtaggcactgcgatgcggacaacgaatcctgcgcccacatcatcggcaactgcccagtgacacaggacgcccgaatcaagaggcacaattacatctgcgaactgcttctcgaggaggcgaagaagaaggactgggtagtgttcaaggaaccgcacataagggattccaacaaggaactgtacaaacctgacctgatatttgtgaaggatgggcgtgcacttgtcgtggatgtgacagtacggtatgaagcagccaaatcatcgctggaggaagccgctgcagagaaagtgagaaagtacaaacacctggaaacggaagtaagacatctcacgaatgcaaaggacgttacttttgtgggctttcccctaggagcgcgggggaaatggcaccaagataactttaaacttttgactgagcttggcctctccaaatcgaggcaagtgaaaatggcagagactttttccacagtagcgctcttttcatctgtggacattgtacatatgtttgccagtagggccagaaaatctatggttatgtgataataggctgccttctgcggggcttgccttctggccatgcccttcttctctcccttgcacctgtacctcttggtctttgaataaagcctgagtaggaaggaccggtaaaaaaaaaaaaaaaaaaaaaaaaaaaaaaacgttgactaaaaaaaaaaaaaaaaaaaaaaaaaaaaaaaaaaaaaaaaaaaaaaaaaaaaaaaaaaaaaaaaaaaaaa

SEQ ID NO: 11810 - DNA, 5240 bp, synthetic construct
  source 1..5240: mol_type = other DNA
gaaataagagagaaaagaagagtaagaagaaatataagagaattcgccaccatgcctaagagaaaggtgtccagcgccgagggcgctgccaaggaagagcctaaacggagaagcgccagactgagcgccaagccccccgccaaggtggaagccaagcctaagaaggccgccgctaaggacaagagcagcgataagaaagtccagaccaagggcaagcggggcgccaaaggcaaacaggccgaggtggccaaccaggagacaaaggaagatctgcctgctgagaacggcgaaaccaagaccgaggaatctccagcttctgacgaggccggagagaaggaggccaaaagcgacagcggctctgagacacctggaacaagcgagagcgccaccccggaatccaatatcagcggctctagctgcggcagccccaacagcgccgacaccagcagcgacttcaaggacctgtggaccaagctgaaggaatgccacgaccgggaagtgcagggactccaggtgaaggtcaccaaactcaagcaagaaagaatcctggacgcccagagactggaagaattcttcaccaagaaccagcagctgagagagcagcagaaagtgctgcacgagacaatcaaggttctggaagatagactgcgggccggcctgtgcgacagatgcgccgtgaccgaggaacacatgcgcaaaaagcagcaggagttcgagaacattagacagcaaaatctgaaattgatcacagagctgatgaacgagagaaacacactgcaggaggagaacaagaagctgagcgagcagctgcaacagaagatcgagaatgatcagcaacaccaggccgctgagctggaatgtgaagaggacgtgatccccgacagcccaatcacagctttcagcttttctggcgtgaacagactgaggcggaaggaaaacccccacgtgcggtacatcgagcagacccataccaagctggaacacagcgtgtgtgccaacgagatgagaaaggtgtccaagtcctccacccatccccagcacaaccctaacgaaaatgagatcctggtggctgatacctacgaccagtctcagagccctatggccaaggcccacggcaccagctcttatacccctgataagagctccttcaacctggccaccgtggtggccgagacactgggcctgggcgtgcaggaggaaagcgagacacagggcccaatgagccctctgggagatgagctgtaccactgcctggaaggcaaccacaagaaacagccttttgagtccggctccgagactcctggaacaagcgagagcgctacacctgagggcagctatgaacaacttgcaccacaaccgtgtgtgggagaaactttacattctagcctcccacgagacagtgaactgtttgtgcctgaagaggggagcagcgagaaggagagcgaggacgcgccaaaaacatctcctccgacgcctgggaaacatggtttggaacagactggggaggaaaaagtgatggtgactgttcctgacaaaaatccaccttgtccttgctgtggtacccgggtaaactctgtgttgaatctgattgaacatctgaaagtgtcacacgggaaaaggggggtttgttttcggtgtgcaaaatgtggaaaggaaaatagtaactatcacagtgttgtttgtcattttaagaaatgcaggggtccagagacggagaaagccccagctggggagtggatttgtgaggtatgcaacagagattttacaaccaaaattggcctgggacaacacaagagattggcacacccagcagtgagaaatcaggaaaggatcgttgcttcccaaccgaaagaaacatcaaatagaggtgctcacaaaaggtgctggacaaaggaggaggaagaattactaataagactggaggctcagttcgagggaaacaaaaatattaataagcttattgcagaacacataaccaccaaaacagctaagcagatcagtgacaaaaggcgattgctgtccagaaagccagcagaggagccacgtgaggagcctggaacgtgtcatcacaccaggagagcagctgcgagcctgagaacggagcctgagatgagtcatcacgcccaggcagaggacagagataatggacctgggagacgccctctgccaggcagggcagctgccggagggagaacaatggacgagataagacgccaccctgataagggcaacggacagcagagacccaccaagcaaaaatcagaagaacagctgcaggcttactataaaaagacactagaggaacgactttcagctggggcacttaacaccttcccccgagcattcaagcaggtaatggaaggccgggatataaagctagtaatcaatcagacagcgcaggactacttcggatgcctggaatccataagccaaataagaacggcaacccgagataaaaaggacacggtgacccgggagaaacacccaaagaaaccttttcagaagtggatgaagaagagagcaatcaaaaaaggtaattatcttcggttccagcgtttattttatcttgatagagggaaactggctaaaatcattttagatgatattgaatgcttgtcttgtgacataccactcagtgaaatttattcggtttttaaaacaagatgggaaacaactggtagctttaaaagccttggggactttaaaacttacgggaaggctgacaacactgccttcagagaattaattacggctaaagaaattgagaaaaatgtgcaggaaatgagcaaaggctcggctcccggtccagacgggattactcttggggacgtcgtaaagatggatcccgagttttcccggaccatggagattttcaatttatggttaacaactggtaaaatcccggacatggtgagggggtgcagaaccgttttgattccaaaatcatcagacccggatcgtttgaaagacattaataactggagacctatcacgatcggttccatcttgctgagactgttctccaggattgtaacagctaggctgagcaaagcgtgccccctgaacccaaggcaaagaggctttatcagagcggcgggatgctctgaaaacttaaaactcctgcaaactataatttggtcggccaaaagagaacacagaccactgggtgttgtattcgtggacatcgccaaggcttttgacaccgtaagccaccagcacatcattcatgctttgcagcaaagagaggtggatccccacatcgtcggtctggtgagcaatatgtacgagaacatcagtacgtatatcaccacaaagaggaacacacacacagacaaaatccagatccgggttggagtaaagcagggtgacccgatgtcgccccttttatttaacctggcaatggaccctctattatgcaagctggaagagagtggcaaaggataccaccgaggacagagcagcatcacagcgatggcatttgcagacgatctggttttgctgagcgactcctgggaaaatatgaatacaaatattagcatactggagaccttctgcaatctgaccggactcaaaacacaggggcaaaagtgccacggcttttacatcaagccgacaaaggactcttacaccatcaatgactgcgctgcctggactatcaacggcacacccctgaacatgatcgaccccggcgaatctgagaaatacctcggcctgcagtttgacccgtggattggaatagcaaggtccggtctctccacaaaactagatttttggcttcagcggatcgatcaagcaccacttaaacctctgcagaaaactgatattctcaaaacatacaccatccctcggctgatctacatagctgaccactcagaagtgaaaagcgcactactcgaaacccttgaccagaagatccggacagcggtcaaggaatggcttcacctacctccgtgcacctgcgatgccatcctgtactcgagcacgagagacggcggtttgggcatcaccaaattggcaggactgatccccagcgtgcaggcccgtagactgcatcggatcgcacagtcatctgacgatacgatgaaatgcttcatggaaaaagagaaaatggaacagctgcataagaaattgtggattcaagctggaggggacagagagaacataccctcgatttgggaagcaccaccgtcgagtgaaccaccaaacaacgtgagcacaaattcggaatgggaagcaccgacccagaaagataaatttccaaagccttgcaattggaggaaaaacgaattcaaaaaatggaccaaattggcatcccaaggccgcggaattgtaaattttgaaagagacaaaattagtaaccattggatccaatactacagacgcatacctcacaggaaactcctcactgcactacaactcagggccaacgtttaccccacgagagaatttctagccaggggtagacaagaccaatacatcaaggcgtgtaggcactgcgatgcggacaacgaatcctgcgcccacatcatcggcaactgcccagtgacacaggacgcccgaatcaagaggcacaattacatctgcgaactgcttctcgaggaggcgaagaagaaggactgggtagtgttcaaggaaccgcacataagggattccaacaaggaactgtacaaacctgacctgatatttgtgaaggatgggcgtgcacttgtcgtggatgtgacagtacggtatgaagcagccaaatcatcgctggaggaagccgctgcagagaaagtgagaaagtacaaacacctggaaacggaagtaagacatctcacgaatgcaaaggacgttacttttgtgggctttcccctaggagcgcgggggaaatggcaccaagataactttaaacttttgactgagcttggcctctccaaatcgaggcaagtgaaaatggcagagactttttccacagtagcgctcttttcatctgtggacattgtacatatgtttgccagtagggccagaaaatctatggttatgtgataataggctgccttctgcggggcttgccttctggccatgcccttcttctctcccttgcacctgtacctcttggtctttgaataaagcctgagtaggaaggaccggtaaaaaaaaaaaaaaaaaaaaaaaaaaaaaaacgttgactaaaaaaaaaaaaaaaaaaaaaaaaaaaaaaaaaaaaaaaaaaaaaaaaaaaaaaaaaaaaaaaaaaaaaa

SEQ ID NO: 11811 - DNA, 5264 bp, synthetic construct
  source 1..5264: mol_type = other DNA
gaaataagagagaaaagaagagtaagaagaaatataagagaattcgccaccatggcccctaagaaaaagcggaaggtgaatatcagcggctctagctgcggcagccccaacagcgccgacaccagcagcgacttcaaggacctgtggaccaagctgaaggaatgccacgaccgggaagtgcagggactccaggtgaaggtcaccaaactcaagcaagaaagaatcctggacgcccagagactggaagaattcttcaccaagaaccagcagctgagagagcagcagaaagtgctgcacgagacaatcaaggttctggaagatagactgcgggccggcctgtgcgacagatgcgccgtgaccgaggaacacatgcgcaaaaagcagcaggagttcgagaacattagacagcaaaatctgaaattgatcacagagctgatgaacgagagaaacacactgcaggaggagaacaagaagctgagcgagcagctgcaacagaagatcgagaatgatcagcaacaccaggccgctgagctggaatgtgaagaggacgtgatccccgacagcccaatcacagctttcagcttttctggcgtgaacagactgaggcggaaggaaaacccccacgtgcggtacatcgagcagacccataccaagctggaacacagcgtgtgtgccaacgagatgagaaaggtgtccaagtcctccacccatccccagcacaaccctaacgaaaatgagatcctggtggctgatacctacgaccagtctcagagccctatggccaaggcccacggcaccagctcttatacccctgataagagctccttcaacctggccaccgtggtggccgagacactgggcctgggcgtgcaggaggaaagcgagacacagggcccaatgagccctctgggagatgagctgtaccactgcctggaaggcaaccacaagaaacagccttttgagtccggctccgagactcctggaacaagcgagagcgctacacctgagggcagccctaagagaaaggtgtccagcgccgagggcgctgccaaggaagagcctaaacggagaagcgccagactgagcgccaagccccccgccaaggtggaagccaagcctaagaaggccgccgctaaggacaagagcagcgataagaaagtccagaccaagggcaagcggggcgccaaaggcaaacaggccgaggtggccaaccaggagacaaaggaagatctgcctgctgagaacggcgaaaccaagaccgaggaatctccagcttctgacgaggccggagagaaggaggccaaaagcgacagcggctctgagacacctggaacaagcgagagcgccaccccggaatcctatgaacaacttgcaccacaaccgtgtgtgggagaaactttacattctagcctcccacgagacagtgaactgtttgtgcctgaagaggggagcagcgagaaggagagcgaggacgcgccaaaaacatctcctccgacgcctgggaaacatggtttggaacagactggggaggaaaaagtgatggtgactgttcctgacaaaaatccaccttgtccttgctgtggtacccgggtaaactctgtgttgaatctgattgaacatctgaaagtgtcacacgggaaaaggggggtttgttttcggtgtgcaaaatgtggaaaggaaaatagtaactatcacagtgttgtttgtcattttaagaaatgcaggggtccagagacggagaaagccccagctggggagtggatttgtgaggtatgcaacagagattttacaaccaaaattggcctgggacaacacaagagattggcacacccagcagtgagaaatcaggaaaggatcgttgcttcccaaccgaaagaaacatcaaatagaggtgctcacaaaaggtgctggacaaaggaggaggaagaattactaataagactggaggctcagttcgagggaaacaaaaatattaataagcttattgcagaacacataaccaccaaaacagctaagcagatcagtgacaaaaggcgattgctgtccagaaagccagcagaggagccacgtgaggagcctggaacgtgtcatcacaccaggagagcagctgcgagcctgagaacggagcctgagatgagtcatcacgcccaggcagaggacagagataatggacctgggagacgccctctgccaggcagggcagctgccggagggagaacaatggacgagataagacgccaccctgataagggcaacggacagcagagacccaccaagcaaaaatcagaagaacagctgcaggcttactataaaaagacactagaggaacgactttcagctggggcacttaacaccttcccccgagcattcaagcaggtaatggaaggccgggatataaagctagtaatcaatcagacagcgcaggactgcttcggatgcctggaatccataagccaaataagaacggcaacccgagataaaaaggacacggtgacccgggagaaacacccaaagaaaccttttcagaagtggatgaagaagagagcaatcaaaaaaggtaattatcttcggttccagcgtttattttatcttgatagagggaaactggctaaaatcattttagatgatattgaatgcttgtcttgtgacataccactcagtgaaatttattcggtttttaaaacaagatgggaaacaactggtagctttaaaagccttggggactttaaaacttacgggaaggctgacaacactgccttcagagaattaattacggctaaagaaattgagaaaaatgtgcaggaaatgagcaaaggctcggctcccggtccagacgggattactcttggggacgtcgtaaagatggatcccgagttttcccggaccatggagattttcaatttatggttaacaactggtaaaatcccggacatggtgagggggtgcagaaccgttttgattccaaaatcatcaaagccggatcgtttgaaagacattaataactggagacctatcacgatcggttccatcttgctgagactgttctccaggattgtaacagctaggctgagcaaagcgtgccccctgaacccaaggcaaagaggctttatcagagcggcgggatgctctgaaaacttaaaactcctgcaaactataatttggtcggccaaaagagaacacagaccactgggtgttgtattcgtggacatcgccaaggcttttgacaccgtaagccaccagcacatcattcatgctttgcagcaaagagaggtggatccccacatcgtcggtctggtgagcaatatgtacgagaacatcagtacgtatatcaccacaaagaggaacacacacacagacaaaatccagatccgggttggagtaaagcagggtgacccgatgtcgccccttttatttaacctggcaatggaccctctattatgcaagctggaagagagtggcaaaggataccaccgaggacagagcagcatcacagcgatggcatttgcagacgatctggttttgctgagcgactcctgggaaaatatgaatacaaatattagcatactggagaccttctgcaatctgaccggactcaaaacacaggggcaaaagtgccacggcttttacatcaagccgacaaaggactcttacaccatcaatgactgcgctgcctggactatcaacggcacacccctgaacatgatcgaccccggcgaatctgagaaatacctcggcctgcagtttgacccgtggattggaatagcaaggtccggtctctccacaaaactagatttttggcttcagcggatcgatcaagcaccacttaaacctctgcagaaactggatattctcaaaacatacaccatccctcggctgatctacatagctgaccactcagaagtgaaaagcgcactactcgaaacccttgaccagaagatccggacagcggtcaaggaatggcttcacctacctccgtgcacctgcgatgccatcctgtactcgagcacgagagacggcggtttgggcatcaccaaattggcaggactgatccccagcgtgcaggcccgtagactgcatcggatcgcacagtcatctgacgatacgatgaaatgcttcatggaaaaagagaaaatggaacagctgcataagaaattgtggattcaagctggaggggacagagagaacataccctcgatttgggaagcaccaccgtcgagtgaaccaccaaacaacgtgagcacaaattcggaatgggaagcaccgacccagaaagataaatttccaaagccttgcaattggaggaaaaacgaattcaaaaaatggaccaaattggcatcccaaggccgcggaattgtaaattttgaaagagacaaaattagtaaccattggatccaatactacagacgcatacctcacaggaaactcctcactgcactacaactcagggccaacgtttaccccacgagagaatttctagccaggggtagacaagaccaatacatcaaggcgtgtaggcactgcgatgcggacaacgaatcctgcgcccacatcatcggcaactgcccagtgacacaggacgcccgaatcaagaggcacaattacatctgcgaactgcttctcgaggaggcgaagaagaaggactgggtagtgttcaaggaaccgcacataagggattccaacaaggaactgtacaaacctgacctgatatttgtgaaggatgggcgtgcacttgtcgtggatgtgacagtacggtatgaagcagccaaatcatcgctggaggaagccgctgcagagaaagtgagaaagtacaaacacctggaaacggaagtaagacatctcacgaatgcaaaggacgttacttttgtgggctttcccctaggagcgcgggggaaatggcaccaagataactttaaacttttgactgagcttggcctctccaaatcgaggcaagtgaaaatggcagagactttttccacagtagcgctcttttcatctgtggacattgtacatatgtttgccagtagggccagaaaatctatggttatgtgataataggctgccttctgcggggcttgccttctggccatgcccttcttctctcccttgcacctgtacctcttggtctttgaataaagcctgagtaggaaggaccggtaaaaaaaaaaaaaaaaaaaaaaaaaaaaaaacgttgactaaaaaaaaaaaaaaaaaaaaaaaaaaaaaaaaaaaaaaaaaaaaaaaaaaaaaaaaaaaaaaaaaaaaaa

SEQ ID NO: 11812 - DNA, 5264 bp, synthetic construct
  source 1..5264: mol_type = other DNA
gaaataagagagaaaagaagagtaagaagaaatataagagaattcgccaccatggcccctaagaaaaagcggaaggtgaatatcagcggctctagctgcggcagccccaacagcgccgacaccagcagcgacttcaaggacctgtggaccaagctgaaggaatgccacgaccgggaagtgcagggactccaggtgaaggtcaccaaactcaagcaagaaagaatcctggacgcccagagactggaagaattcttcaccaagaaccagcagctgagagagcagcagaaagtgctgcacgagacaatcaaggttctggaagatagactgcgggccggcctgtgcgacagatgcgccgtgaccgaggaacacatgcgcaaaaagcagcaggagttcgagaacattagacagcaaaatctgaaattgatcacagagctgatgaacgagagaaacacactgcaggaggagaacaagaagctgagcgagcagctgcaacagaagatcgagaatgatcagcaacaccaggccgctgagctggaatgtgaagaggacgtgatccccgacagcccaatcacagctttcagcttttctggcgtgaacagactgaggcggaaggaaaacccccacgtgcggtacatcgagcagacccataccaagctggaacacagcgtgtgtgccaacgagatgagaaaggtgtccaagtcctccacccatccccagcacaaccctaacgaaaatgagatcctggtggctgatacctacgaccagtctcagagccctatggccaaggcccacggcaccagctcttatacccctgataagagctccttcaacctggccaccgtggtggccgagacactgggcctgggcgtgcaggaggaaagcgagacacagggcccaatgagccctctgggagatgagctgtaccactgcctggaaggcaaccacaagaaacagccttttgagtccggctccgagactcctggaacaagcgagagcgctacacctgagggcagccctaagagaaaggtgtccagcgccgagggcgctgccaaggaagagcctaaacggagaagcgccagactgagcgccaagccccccgccaaggtggaagccaagcctaagaaggccgccgctaaggacaagagcagcgataagaaagtccagaccaagggcaagcggggcgccaaaggcaaacaggccgaggtggccaaccaggagacaaaggaagatctgcctgctgagaacggcgaaaccaagaccgaggaatctccagcttctgacgaggccggagagaaggaggccaaaagcgacagcggctctgagacacctggaacaagcgagagcgccaccccggaatcctatgaacaacttgcaccacaaccgtgtgtgggagaaactttacattctagcctcccacgagacagtgaactgtttgtgcctgaagaggggagcagcgagaaggagagcgaggacgcgccaaaaacatctcctccgacgcctgggaaacatggtttggaacagactggggaggaaaaagtgatggtgactgttcctgacaaaaatccaccttgtccttgctgtggtacccgggtaaactctgtgttgaatctgattgaacatctgaaagtgtcacacgggaaaaggggggtttgttttcggtgtgcaaaatgtggaaaggaaaatagtaactatcacagtgttgtttgtcattttaagaaatgcaggggtccagagacggagaaagccccagctggggagtggatttgtgaggtatgcaacagagattttacaaccaaaattggcctgggacaacacaagagattggcacacccagcagtgagaaatcaggaaaggatcgttgcttcccaaccgaaagaaacatcaaatagaggtgctcacaaaaggtgctggacaaaggaggaggaagaattactaataagactggaggctcagttcgagggaaacaaaaatattaataagcttattgcagaacacataaccaccaaaacagctaagcagatcagtgacaaaaggcgattgctgtccagaaagccagcagaggagccacgtatggagcctggaacgtgtcatcacaccaggagagcagctgcgagcctgagaacggagcctgagatgagtcatcacgcccaggcagaggacagagataatggacctgggagacgccctctgccaggcagggcagctgccggagggagaacaatggacgagataagacgccaccctgataagggcaacggacagcagagacccaccaagcaaaaatcagaagaacagctgcaggcttactataaaaagacactagaggaacgactttcagctggggcacttaacaccttcccccgagcattcaagcaggtaatggaaggccgggatataaagctagtaatcaatcagacagcgcaggactgcttcggatgcctggaatccataagccaaataagaacggcaacccgagataaaaaggacacggtgacccgggagaaacacccaaagaaaccttttcagaagtggatgaagaagagagcaatcaaaaaaggtaattatcttcggttccagcgtttattttatcttgatagagggaaactggctaaaatcattttagatgatattgaatgcttgtcttgtgacataccactcagtgaaatttattcggtttttaaaacaagatgggaaacaactggtagctttaaaagccttggggactttaaaacttacgggaaggctgacaacactgccttcagagaattaattacggctaaagaaattgagaaaaatgtgcaggaaatgagcaaaggctcggctcccggtccagacgggattactcttggggacgtcgtaaagatggatcccgagttttcccggaccatggagattttcaatttatggttaacaactggtaaaatcccggacatggtgagggggtgcagaaccgttttgattccaaaatcatcaaagccggatcgtttgaaagacattaataactggagacctatcacgatcggttccatcttgctgagactgttctccaggattgtaacagctaggctgagcaaagcgtgccccctgaacccaaggcaaagaggctttatcagagcggcgggatgctctgaaaacttaaaactcctgcaaactataatttggtcggccaaaagagaacacagaccactgggtgttgtattcgtggacatcgccaaggcttttgacaccgtaagccaccagcacatcattcatgctttgcagcaaagagaggtggatccccacatcgtcggtctggtgagcaatatgtacgagaacatcagtacgtatatcaccacaaagaggaacacacacacagacaaaatccagatccgggttggagtaaagcagggtgacccgatgtcgccccttttatttaacctggcaatggaccctctattatgcaagctggaagagagtggcaaaggataccaccgaggacagagcagcatcacagcgatggcatttgcagacgatctggttttgctgagcgactcctgggaaaatatgaatacaaatattagcatactggagaccttctgcaatctgaccggactcaaaacacaggggcaaaagtgccacggcttttacatcaagccgacaaaggactcttacaccatcaatgactgcgctgcctggactatcaacggcacacccctgaacatgatcgaccccggcgaatctgagaaatacctcggcctgcagtttgacccgtggattggaatagcaaggtccggtctctccacaaaactagatttttggcttcagcggatcgatcaagcaccacttaaacctctgcagaaaactgatattctcaaaacatacaccatccctcggctgatctacatagctgaccactcagaagtgaaaagcgcactactcgaaacccttgaccagaagatccggacagcggtcaaggaatggcttcacctacctccgtgcacctgcgatgccatcctgtactcgagcacgagagacggcggtttgggcatcaccaaattggcaggactgatccccagcgtgcaggcccgtagactgcatcggatcgcacagtcatctgacgatacgatgaaatgcttcatggaaaaagagaaaatggaacagctgcataagaaattgtggattcaagctggaggggacagagagaacataccctcgatttgggaagcaccaccgtcgagtgaaccaccaaacaacgtgagcacaaattcggaatgggaagcaccgacccagaaagataaatttccaaagccttgcaattggaggaaaaacgaattcaaaaaatggaccaaattggcatcccaaggccgcggaattgtaaattttgaaagagacaaaattagtaaccattggatccaatactacagacgcatacctcacaggaaactcctcactgcactacaactcagggccaacgtttaccccacgagagaatttctagccaggggtagacaagaccaatacatcaaggcgtgtaggcactgcgatgcggacaacgaatcctgcgcccacatcatcggcaactgcccagtgacacaggacgcccgaatcaagaggcacaattacatctgcgaactgcttctcgaggaggcgaagaagaaggactgggtagtgttcaaggaaccgcacataagggattccaacaaggaactgtacaaacctgacctgatatttgtgaaggatgggcgtgcacttgtcgtggatgtgacagtacggtatgaagcagccaaatcatcgctggaggaagccgctgcagagaaagtgagaaagtacaaacacctggaaacggaagtaagacatctcacgaatgcaaaggacgttacttttgtgggctttcccctaggagcgcgggggaaatggcaccaagataactttaaacttttgactgagcttggcctctccaaatcgaggcaagtgaaaatggcagagactttttccacagtagcgctcttttcatctgtggacattgtacatatgtttgccagtagggccagaaaatctatggttatgtgataataggctgccttctgcggggcttgccttctggccatgcccttcttctctcccttgcacctgtacctcttggtctttgaataaagcctgagtaggaaggaccggtaaaaaaaaaaaaaaaaaaaaaaaaaaaaaaacgttgactaaaaaaaaaaaaaaaaaaaaaaaaaaaaaaaaaaaaaaaaaaaaaaaaaaaaaaaaaaaaaaaaaaaaaa

SEQ ID NO: 11813 - DNA, 5264 bp, synthetic construct
  source 1..5264: mol_type = other DNA
gaaataagagagaaaagaagagtaagaagaaatataagagaattcgccaccatggcccctaagaaaaagcggaaggtgaatatcagcggctctagctgcggcagccccaacagcgccgacaccagcagcgacttcaaggacctgtggaccaagctgaaggaatgccacgaccgggaagtgcagggactccaggtgaaggtcaccaaactcaagcaagaaagaatcctggacgcccagagactggaagaattcttcaccaagaaccagcagctgagagagcagcagaaagtgctgcacgagacaatcaaggttctggaagatagactgcgggccggcctgtgcgacagatgcgccgtgaccgaggaacacatgcgcaaaaagcagcaggagttcgagaacattagacagcaaaatctgaaattgatcacagagctgatgaacgagagaaacacactgcaggaggagaacaagaagctgagcgagcagctgcaacagaagatcgagaatgatcagcaacaccaggccgctgagctggaatgtgaagaggacgtgatccccgacagcccaatcacagctttcagcttttctggcgtgaacagactgaggcggaaggaaaacccccacgtgcggtacatcgagcagacccataccaagctggaacacagcgtgtgtgccaacgagatgagaaaggtgtccaagtcctccacccatccccagcacaaccctaacgaaaatgagatcctggtggctgatacctacgaccagtctcagagccctatggccaaggcccacggcaccagctcttatacccctgataagagctccttcaacctggccaccgtggtggccgagacactgggcctgggcgtgcaggaggaaagcgagacacagggcccaatgagccctctgggagatgagctgtaccactgcctggaaggcaaccacaagaaacagccttttgagtccggctccgagactcctggaacaagcgagagcgctacacctgagggcagccctaagagaaaggtgtccagcgccgagggcgctgccaaggaagagcctaaacggagaagcgccagactgagcgccaagccccccgccaaggtggaagccaagcctaagaaggccgccgctaaggacaagagcagcgataagaaagtccagaccaagggcaagcggggcgccaaaggcaaacaggccgaggtggccaaccaggagacaaaggaagatctgcctgctgagaacggcgaaaccaagaccgaggaatctccagcttctgacgaggccggagagaaggaggccaaaagcgacagcggctctgagacacctggaacaagcgagagcgccaccccggaatcctatgaacaacttgcaccacaaccgtgtgtgggagaaactttacattctagcctcccacgagacagtgaactgtttgtgcctgaagaggggagcagcgagaaggagagcgaggacgcgccaaaaacatctcctccgacgcctgggaaacatggtttggaacagactggggaggaaaaagtgatggtgactgttcctgacaaaaatccaccttgtccttgctgtggtacccgggtaaactctgtgttgaatctgattgaacatctgaaagtgtcacacgggaaaaggggggtttgttttcggtgtgcaaaatgtggaaaggaaaatagtaactatcacagtgttgtttgtcattttaagaaatgcaggggtccagagacggagaaagccccagctggggagtggatttgtgaggtatgcaacagagattttacaaccaaaattggcctgggacaacacaagagattggcacacccagcagtgagaaatcaggaaaggatcgttgcttcccaaccgaaagaaacatcaaatagaggtgctcacaaaaggtgctggacaaaggaggaggaagaattactaataagactggaggctcagttcgagggaaacaaaaatattaataagcttattgcagaacacataaccaccaaaacagctaagcagatcagtgacaaaaggcgattgctgtccagaaagccagcagaggagccacgtgaggagcctggaacgtgtcatcacaccaggagagcagctgcgagcctgagaacggagcctgagatgagtcatcacgcccaggcagaggacagagataatggacctgggagacgccctctgccaggcagggcagctgccggagggagaacaatggacgagataagacgccaccctgataagggcaacggacagcagagacccaccaagcaaaaatcagaagaacagctgcaggcttactataaaaagacactagaggaacgactttcagctggggcacttaacaccttcccccgagcattcaagcaggtaatggaaggccgggatataaagctagtaatcaatcagacagcgcaggactacttcggatgcctggaatccataagccaaataagaacggcaacccgagataaaaaggacacggtgacccgggagaaacacccaaagaaaccttttcagaagtggatgaagaagagagcaatcaaaaaaggtaattatcttcggttccagcgtttattttatcttgatagagggaaactggctaaaatcattttagatgatattgaatgcttgtcttgtgacataccactcagtgaaatttattcggtttttaaaacaagatgggaaacaactggtagctttaaaagccttggggactttaaaacttacgggaaggctgacaacactgccttcagagaattaattacggctaaagaaattgagaaaaatgtgcaggaaatgagcaaaggctcggctcccggtccagacgggattactcttggggacgtcgtaaagatggatcccgagttttcccggaccatggagattttcaatttatggttaacaactggtaaaatcccggacatggtgagggggtgcagaaccgttttgattccaaaatcatcagacccggatcgtttgaaagacattaataactggagacctatcacgatcggttccatcttgctgagactgttctccaggattgtaacagctaggctgagcaaagcgtgccccctgaacccaaggcaaagaggctttatcagagcggcgggatgctctgaaaacttaaaactcctgcaaactataatttggtcggccaaaagagaacacagaccactgggtgttgtattcgtggacatcgccaaggcttttgacaccgtaagccaccagcacatcattcatgctttgcagcaaagagaggtggatccccacatcgtcggtctggtgagcaatatgtacgagaacatcagtacgtatatcaccacaaagaggaacacacacacagacaaaatccagatccgggttggagtaaagcagggtgacccgatgtcgccccttttatttaacctggcaatggaccctctattatgcaagctggaagagagtggcaaaggataccaccgaggacagagcagcatcacagcgatggcatttgcagacgatctggttttgctgagcgactcctgggaaaatatgaatacaaatattagcatactggagaccttctgcaatctgaccggactcaaaacacaggggcaaaagtgccacggcttttacatcaagccgacaaaggactcttacaccatcaatgactgcgctgcctggactatcaacggcacacccctgaacatgatcgaccccggcgaatctgagaaatacctcggcctgcagtttgacccgtggattggaatagcaaggtccggtctctccacaaaactagatttttggcttcagcggatcgatcaagcaccacttaaacctctgcagaaactggatattctcaaaacatacaccatccctcggctgatctacatagctgaccactcagaagtgaaaagcgcactactcgaaacccttgaccagaagatccggacagcggtcaaggaatggcttcacctacctccgtgcacctgcgatgccatcctgtactcgagcacgagagacggcggtttgggcatcaccaaattggcaggactgatccccagcgtgcaggcccgtagactgcatcggatcgcacagtcatctgacgatacgatgaaatgcttcatggaaaaagagaaaatggaacagctgcataagaaattgtggattcaagctggaggggacagagagaacataccctcgatttgggaagcaccaccgtcgagtgaaccaccaaacaacgtgagcacaaattcggaatgggaagcaccgacccagaaagataaatttccaaagccttgcaattggaggaaaaacgaattcaaaaaatggaccaaattggcatcccaaggccgcggaattgtaaattttgaaagagacaaaattagtaaccattggatccaatactacagacgcatacctcacaggaaactcctcactgcactacaactcagggccaacgtttaccccacgagagaatttctagccaggggtagacaagaccaatacatcaaggcgtgtaggcactgcgatgcggacaacgaatcctgcgcccacatcatcggcaactgcccagtgacacaggacgcccgaatcaagaggcacaattacatctgcgaactgcttctcgaggaggcgaagaagaaggactgggtagtgttcaaggaaccgcacataagggattccaacaaggaactgtacaaacctgacctgatatttgtgaaggatgggcgtgcacttgtcgtggatgtgacagtacggtatgaagcagccaaatcatcgctggaggaagccgctgcagagaaagtgagaaagtacaaacacctggaaacggaagtaagacatctcacgaatgcaaaggacgttacttttgtgggctttcccctaggagcgcgggggaaatggcaccaagataactttaaacttttgactgagcttggcctctccaaatcgaggcaagtgaaaatggcagagactttttccacagtagcgctcttttcatctgtggacattgtacatatgtttgccagtagggccagaaaatctatggttatgtgataataggctgccttctgcggggcttgccttctggccatgcccttcttctctcccttgcacctgtacctcttggtctttgaataaagcctgagtaggaaggaccggtaaaaaaaaaaaaaaaaaaaaaaaaaaaaaaacgttgactaaaaaaaaaaaaaaaaaaaaaaaaaaaaaaaaaaaaaaaaaaaaaaaaaaaaaaaaaaaaaaaaaaaaaa

SEQ ID NO: 11814 - DNA, 5407 bp, synthetic construct
  source 1..5407: mol_type = other DNA
ggtctagttacaactgggcatcgctgcagagatcgcacctcctcgtggtcccgctggtagcccttcgaagggtgactaagtcgatctctgccccaggtacggagccgttgggactcaccagtccaacgtaactcctgcctaaattcggtgaaacaaattcctcggtaaaaagccccatgggaactgcactaacaccgctcctgacgaagttcgccacgcgctacgagatgggtaccacgcctgaagaagtggcgaacacgctcaagcagacctgtttcaagggccaggtcaatgattcgcagatggtcgccctgctgatcgtggcagaccagtacaagcttaaccccttcaccaaggagttgtacgcattccccgacaagaacaacggcatcgtgccggttgttggtgtggatggctgggctcggatcatcaacgagaacccacagttcgatggcatggaattctcaatggaccagcagggaaccgaatgcacctgcaagatctatcggaaggaccgcagccatgccatcagcgcgactgagtacatggccgagtgcaagcggaacacccagccttggcagtcccatccgcgccggatgcttcgccacaaggcaatgatccagtgcgcacgcctcgcgttcgggttcgccggcatatacgaccaggacgaggccgagcggatcgttgaacgagacgtcactcccgcagagcagtacgaggacgtcagcgaggcgatctgcctgatcaaggactccccaacaatggaggacttgcaggcagcattcagcaatgcctggaaagcctataagacaaagggcgcgcgcgaccagcttacggcggccaaggaccagcggaagaaagaattgctggacgcccctatagacgttgaattcgaggagaccggcgatgatcgagcagcgtctggaggatctagcggaggatcctctggcagcgagacaccaggaacaagcgagtcagcaacaccagagagcagtggcggcagcagcggcggcagcagcatggcttcttgcccgaaacctggccccccggtttcagcaggggcaatgagtttggaaagtggactgaccacccactccgttctcgccatcgaacgtggtcccaattcgttggcaaattccggatcagactttgggggggggggtctggggctaccgttacgcctattgagggtatcggtcggcactcagacctcccgctccgactgggtagacctggtgtcctggagccacccaggacccacgtctaagtcccagcaggttgacctggtgtctttatttcctaaacaccgggttgacctgttatccaaaaacgaccaggtagacctggtggctcaatttttaccatctaaatttccccccaatttggcagaaaatgatttggctttgctggtgaacttagagttctacagatcggatttgcatgtgtatgagtgtgttcataaggctgcacattgggagggattaagtggtttgcctgaggtgtatgaacaacttgcaccacaaccgtgtgtgggagaaactttacattctagcctcccacgagacagtgaactgtttgtgcctgaagaggggagcagcgagaaggagagcgaggacgcgccaaaaacatctcctccgacgcctgggaaacatggtttggaacagactggggaggaaaaagtgatggtgactgttcctgacaaaaatccaccttgtccttgctgtggtacccgggtaaactctgtgttgaatctgattgaacatctgaaagtgtcacacgggaaaaggagggtttgttttcggtgtgcaaaatgtggaaaggaaaatagtaactatcacagtgttgtttgtcattttaagaaatgcaggggtccagagacggagaaagccccagctggggagtggatttgtgaggtatgcaacagagattttacaaccaaaattggcctgggacaacacaagagattggcacacccagcagtgagaaatcaggaaaggatcgttgcttcccaaccgaaagaaacatcaaatagaggtgctcacaaaaggtgctggacaaaggaggaggaagaattactaataagactggaggctcagttcgagggacacaaaaatattaataagcttattgcagaacacataaccaccaaaacagctaagcagatcagtgacaaaaggcgattgctgtccagaaagccagcagaggagccacgtgaggagcctggaacgtgtcatcacaccaggagagcagctgcgagcctgagaacggagcctgagatgagtcatcacgcccaggcagaggacagagataatggacctgggagacgccctctgccaggcagggcagctgccggagggagaacaatggacgagataagacgccaccctgataagggcaacggacagcagagacccaccaagcaaaaatcagaagaacagctgcaggcttactataaaaagacactagaggaacgactttcagctggggcacttaacaccttcccccgagcattcaagcaggtaatggaaggccgggatataaagctagtaatcaatcagacagcgcaggactgcttcggatgcctggaatccataagccaaataagaacggcaacccgagataaaaagtacacggtgacccgggagaaacacccaaagaggccttttcagaagtggatgaagaagagagcaatcaaaaaaggtaattatcttcggttccagcgtttattttatcttgatagagggaaactggctaaaatcattttagatgatattgaatgcttgtcttgtgacataccactcagtgaaatttattcggtttttaaaacaagatgggaaacaactggtagctttaaaagccttggggactttaaaacttacgggaaggctgacaacactgccttcagagaattaattacggctaaagaaattgagaaaaatgtgcaggaaatgagcaaaggctcggctcccggtccagacgggattactcttggggacgtcgtaaagatggatcccgagttttccctgaccatggagattttcaatttatggttaacaactggtaaaatcccggacatggtgagggggtgcagaaccgttttgattccaaaatcatcaaagccggatcgtttgaaagacattaataactggagacctatcacgatcggttccatcttgctgagactgttctccaggattgtaacagctaggctgagcaaagcgtgccccctgaacccaaggcaaagaggctttatcagagcggcgggatgctctgaaaacttaaaactcctgcaaactataatttggtcggccaaaagagaacacagaccactgggtgttgtattcgtggacatcgccaaggcttttgacaccgtaagccaccagcacatcattcatgctttgcagcaaagagaggtggatccccacatcgtcggtctggtgagcaatatgtacgagaacatcagtacgtatatcaccacaaagaggaacacacacacagacaaaatccagatccgggttggagtaaagcagggtgacccgatgtcgccccttttatttaacctggcaatggaccctctattatgcaagctggaagagagtggcaaaggataccaccgaggacagagcagcatcacagcgatggcatttgcagacgatctggttttgctgagcgactcctgggaaaatatgaatacaaatattagcatactggagaccttctgcaatctgaccggactcaaaacacaggggcaaaagtgccacggcttttacatcaagccgacaaaggactcttacaccatcaatgactgcgctgcctggactatcaacggcacacccctgaacatgatcgaccccggcgaatctgagaaatacctcggcctgcagtttgacccgtggattggaatagcaaggtccggtctctccacaaaactagatgagtggcttcagcggatcgatcaagcaccacttaaacctctgcagaaaactgatattctcaaaacatacaccatccctcggctgatctacatagctgaccactcagaagtgaaagccgcactactcgaaacccttgaccagaagatccggacagcggtcaaggaatggcttcacctacctccgtgcacctgcgatgccatcctgtactcgagcacgagagacggcggtttgggcatcaccaaattggcaggactgatccccagcgtgcaggcccgtagactgcatcggatcgcacagtcatctgacgatacgatgaaatgcttcatggaaaaagagaggatggaacagctgcataagaaattgtggattcaagctggaggggacagagagaacataccctcgatttgggaagcaccaccgtcgagtgaaccaccaaacaacgtgagcacaaattcggaatgggaagcaccgacccagaaacccaaatttccaaagccttgcaattggaggaaaaacgaattcaaaaaatggaccaaattggcatcccaaggccgcggaattgtaaattttgaaagagacaaaattagtaaccattggatccaatactacagacgcatacctcacaggaaactcctcactgcactacaactcagggccaacgtttaccccacgagagaatttctagccaggggtagacaagaccaatacatcaaggcgtgtaggcactgcgatgcggacattgaatcctgcgcccacatcatcggcaactgcccagtgacacaggacgcccgaatcaagaggcacaattacatctgcgaactgcttctcgaggaggcgaagaagaaggactgggtagtgttcaaggaaccgcacataagggattccaacaaggaactgtacaaacctgacctgatatttgtgaaggatggccgtgcacttgtcgtggatgtgacagtacggtatgaagcagccaaatcatcgctggaggaagccgctgcagagaaagtgagaaagtacaaacacctggaaacggaagtaagacatctcacgaatgcaaaggacgttacttttgtgggctttcccctaggagcgcgggggaaatggcaccaagataactttaaacttttgactgagcttggcctctccaaatcgaggcaagtgaaaatggcagagactttttccacagtagcgctcttttcatctgtggacattgtacatatgtttgccagtagggccagaaaatctatggttatgtgataataggctgccttctgcggggcttgccttctggccatgcccttcttctctcccttgcacctgtacctcttggtctttgaataaagcctgagtaggaaggaccggtaaaaaaaaaaaaaaaaaaaaaaaaaaaaaaacgttgactaaaaaaaaaaaaaaaaaaaaaaaaaaaaaaaaaaaaaaaaaaaaaaaaaaaaaaaaaaaaaaaaaaaaaa

SEQ ID NO: 11815 - DNA, 5407 bp, synthetic construct
  source 1..5407: mol_type = other DNA
ggtctagttacaactgggcatcgctgcagagatcgcacctcctcgtggtcccgctggtagcccttcgaagggtgactaagtcgatctctgccccaggtacggagccgttgggactcaccagtccaacgtaactcctgcctaaattcggtgaaacaaattcctcggtaaaaagccccatgggaactgcactaacaccgctcctgacgaagttcgccacgcgctacgagatgggtaccacgcctgaagaagtggcgaacacgctcaagcagacctgtttcaagggccaggtcaatgattcgcagatggtcgccctgctgatcgtggcagaccagtacaagcttaaccccttcaccaaggagttgtacgcattccccgacaagaacaacggcatcgtgccggttgttggtgtggatggctgggctcggatcatcaacgagaacccacagttcgatggcatggaattctcaatggaccagcagggaaccgaatgcacctgcaagatctatcggaaggaccgcagccatgccatcagcgcgactgagtacatggccgagtgcaagcggaacacccagccttggcagtcccatccgcgccggatgcttcgccacaaggcaatgatccagtgcgcacgcctcgcgttcgggttcgccggcatatacgaccaggacgaggccgagcggatcgttgaacgagacgtcactcccgcagagcagtacgaggacgtcagcgaggcgatctgcctgatcaaggactccccaacaatggaggacttgcaggcagcattcagcaatgcctggaaagcctataagacaaagggcgcgcgcgaccagcttacggcggccaaggaccagcggaagaaagaattgctggacgcccctatagacgttgaattcgaggagaccggcgatgatcgagcagcgtctggaggatctagcggaggatcctctggcagcgagacaccaggaacaagcgagtcagcaacaccagagagcagtggcggcagcagcggcggcagcagcatggcttcttgcccgaaacctggccccccggtttcagcaggggcaatgagtttggaaagtggactgaccacccactccgttctcgccatcgaacgtggtcccaattcgttggcaaattccggatcagactttgggggggggggtctggggctaccgttacgcctattgagggtatcggtcggcactcagacctcccgctccgactgggtagacctggtgtcctggagccacccaggacccacgtctaagtcccagcaggttgacctggtgtctttatttcctaaacaccgggttgacctgttatccaaaaacgaccaggtagacctggtggctcaatttttaccatctaaatttccccccaatttggcagaaaatgatttggctttgctggtgaacttagagttctacagatcggatttgcatgtgtatgagtgtgttcataaggctgcacattgggagggattaagtggtttgcctgaggtgtatgaacaacttgcaccacaaccgtgtgtgggagaaactttacattctagcctcccacgagacagtgaactgtttgtgcctgaagaggggagcagcgagaaggagagcgaggacgcgccaaaaacatctcctccgacgcctgggaaacatggtttggaacagactggggaggaaaaagtgatggtgactgttcctgacaaaaatccaccttgtccttgctgtggtacccgggtaaactctgtgttgaatctgattgaacatctgaaagtgtcacacgggaaaaggggggtttgttttcggtgtgcaaaatgtggaaaggaaaatagtaactatcacagtgttgtttgtcattttaagaaatgcaggggtccagagacggagaaagccccagctggggagtggatttgtgaggtatgcaacagagattttacaaccaaaattggcctgggacaacacaagagattggcacacccagcagtgagaaatcaggaaaggatcgttgcttcccaaccgaaagaaacatcaaatagaggtgctcacaaaaggtgctggacaaaggaggaggaagaattactaataagactggaggctcagttcgagggacacaaaaatattaataagcttattgcagaacacataaccaccaaaacagctaagcagatcagtgacaaaaggcgattgctgtccagaaagccagcagaggagccacgtgaggagcctggaacgtgtcatcacaccaggagagcagctgcgagcctgagaacggagcctgagatgagtcatcacgcccaggcagaggacagagataatggacctgggagacgccctctgccaggcagggcagctgccggagggagaacaatggacgagataagacgccaccctgataagggcaacggacagcagagacccaccaagcaaaaatcagaagaacagctgcaggcttactataaaaagacactagaggaacgactttcagctggggcacttaacaccttcccccgagcattcaagcaggtaatggaaggccgggatataaagctagtaatcaatcagacagcgcaggactgcttcggatgcctggaatccataagccaaataagaacggcaacccgagataaaaagtacacggtgacccgggagaaacacccaaagaggccttttcagaagtggatgaagaagagagcaatcaaaaaaggtaattatcttcggttccagcgtttattttatcttgatagagggaaactggctaaaatcattttagatgatattgaatgcttgtcttgtgacataccactcagtgaaatttattcggtttttaaaacaagatgggaaacaactggtagctttaaaagccttggggactttaaaacttacgggaaggctgacaacactgccttcagagaattaattacggctaaagaaattgagaaaaatgtgcaggaaatgagcaaaggctcggctcccggtccagacgggattactcttggggacgtcgtaaagatggatcccgagttttccctgaccatggagattttcaatttatggttaacaactggtaaaatcccggacatggtgagggggtgcagaaccgttttgattccaaaatcatcaaagccggatcgtttgaaagacattaataactggagacctatcacgatcggttccatcttgctgagactgttctccaggattgtaacagctaggctgagcaaagcgtgccccctgaacccaaggcaaagaggctttatcagagcggcgggatgctctgaaaacttaaaactcctgcaaactataatttggtcggccaaaagagaacacagaccactgggtgttgtattcgtggacatcgccaaggcttttgacaccgtaagccaccagcacatcattcatgctttgcagcaaagagaggtggatccccacatcgtcggtctggtgagcaatatgtacgagaacatcagtacgtatatcaccacaaagaggaacacacacacagacaaaatccagatccgggttggagtaaagcagggtgacccgatgtcgccccttttatttaacctggcaatggaccctctattatgcaagctggaagagagtggcaaaggataccaccgaggacagagcagcatcacagcgatggcatttgcagacgatctggttttgctgagcgactcctgggaaaatatgaatacaaatattagcatactggagaccttctgcaatctgaccggactcaaaacacaggggcaaaagtgccacggcttttacatcaagccgacaaaggactcttacaccatcaatgactgcgctgcctggactatcaacggcacacccctgaacatgatcgaccccggcgaatctgagaaatacctcggcctgcagtttgacccgtggattggaatagcaaggtccggtctctccacaaaactagatgagtggcttcagcggatcgatcaagcaccacttaaacctctgcagaaaactgatattctcaaaacatacaccatccctcggctgatctacatagctgaccactcagaagtgaaagccgcactactcgaaacccttgaccagaagatccggacagcggtcaaggaatggcttcacctacctccgtgcacctgcgatgccatcctgtactcgagcacgagagacggcggtttgggcatcaccaaattggcaggactgatccccagcgtgcaggcccgtagactgcatcggatcgcacagtcatctgacgatacgatgaaatgcttcatggaaaaagagaggatggaacagctgcataagaaattgtggattcaagctggaggggacagagagaacataccctcgatttgggaagcaccaccgtcgagtgaaccaccaaacaacgtgagcacaaattcggaatgggaagcaccgacccagaaacccaaatttccaaagccttgcaattggaggaaaaacgaattcaaaaaatggaccaaattggcatcccaaggccgcggaattgtaaattttgaaagagacaaaattagtaaccattggatccaatactacagacgcatacctcacaggaaactcctcactgcactacaactcagggccaacgtttaccccacgagagaatttctagccaggggtagacaagaccaatacatcaaggcgtgtaggcactgcgatgcggacattgaatcctgcgcccacatcatcggcaactgcccagtgacacaggacgcccgaatcaagaggcacaattacatctgcgaactgcttctcgaggaggcgaagaagaaggactgggtagtgttcaaggaaccgcacataagggattccaacaaggaactgtacaaacctgacctgatatttgtgaaggatggccgtgcacttgtcgtggatgtgacagtacggtatgaagcagccaaatcatcgctggaggaagccgctgcagagaaagtgagaaagtacaaacacctggaaacggaagtaagacatctcacgaatgcaaaggacgttacttttgtgggctttcccctaggagcgcgggggaaatggcaccaagataactttaaacttttgactgagcttggcctctccaaatcgaggcaagtgaaaatggcagagactttttccacagtagcgctcttttcatctgtggacattgtacatatgtttgccagtagggccagaaaatctatggttatgtgataataggctgccttctgcggggcttgccttctggccatgcccttcttctctcccttgcacctgtacctcttggtctttgaataaagcctgagtaggaaggaccggtaaaaaaaaaaaaaaaaaaaaaaaaaaaaaaacgttgactaaaaaaaaaaaaaaaaaaaaaaaaaaaaaaaaaaaaaaaaaaaaaaaaaaaaaaaaaaaaaaaaaaaaaa

SEQ ID NO: 11816 - DNA, 5407 bp, synthetic construct
  source 1..5407: mol_type = other DNA
ggtctagttacaactgggcatcgctgcagagatcgcacctcctcgtggtcccgctggtagcccttcgaagggtgactaagtcgatctctgccccaggtacggagccgttgggactcaccagtccaacgtaactcctgcctaaattcggtgaaacaaattcctcggtaaaaagccccatgggaactgcactaacaccgctcctgacgaagttcgccacgcgctacgagatgggtaccacgcctgaagaagtggcgaacacgctcaagcagacctgtttcaagggccaggtcaatgattcgcagatggtcgccctgctgatcgtggcagaccagtacaagcttaaccccttcaccaaggagttgtacgcattccccgacaagaacaacggcatcgtgccggttgttggtgtggatggctgggctcggatcatcaacgagaacccacagttcgatggcatggaattctcaatggaccagcagggaaccgaatgcacctgcaagatctatcggaaggaccgcagccatgccatcagcgcgactgagtacatggccgagtgcaagcggaacacccagccttggcagtcccatccgcgccggatgcttcgccacaaggcaatgatccagtgcgcacgcctcgcgttcgggttcgccggcatatacgaccaggacgaggccgagcggatcgttgaacgagacgtcactcccgcagagcagtacgaggacgtcagcgaggcgatctgcctgatcaaggactccccaacaatggaggacttgcaggcagcattcagcaatgcctggaaagcctataagacaaagggcgcgcgcgaccagcttacggcggccaaggaccagcggaagaaagaattgctggacgcccctatagacgttgaattcgaggagaccggcgatgatcgagcagcgtctggaggatctagcggaggatcctctggcagcgagacaccaggaacaagcgagtcagcaacaccagagagcagtggcggcagcagcggcggcagcagcatggcttcttgcccgaaacctggccccccggtttcagcaggggcaatgagtttggaaagtggactgaccacccactccgttctcgccatcgaacgtggtcccaattcgttggcaaattccggatcagactttgggggggggggtctggggctaccgttacgcctattgagggtatcggtcggcactcagacctcccgctccgactgggtagacctggtgtcctggagccacccaggacccacgtctaagtcccagcaggttgacctggtgtctttatttcctaaacaccgggttgacctgttatccaaaaacgaccaggtagacctggtggctcaatttttaccatctaaatttccccccaatttggcagaaaatgatttggctttgctggtgaacttagagttctacagatcggatttgcatgtgtatgagtgtgttcataaggctgcacattgggagggattaagtggtttgcctgaggtgtatgaacaacttgcaccacaaccgtgtgtgggagaaactttacattctagcctcccacgagacagtgaactgtttgtgcctgaagaggggagcagcgagaaggagagcgaggacgcgccaaaaacatctcctccgacgcctgggaaacatggtttggaacagactggggaggaaaaagtgatggtgactgttcctgacaaaaatccaccttgtccttgctgtggtacccgggtaaactctgtgttgaatctgattgaacatctgaaagtgtcacacgggaaaaggagggtttgttttcggtgtgcaaaatgtggaaaggaaaatagtaactatcacagtgttgtttgtcattttccaaaatgcaggggtccagagacggagaaagccccagctggggagtggatttgtgaggtatgcaacagagattttacaaccaaaattggcctgggacaacacaagagattggcacacccagcagtgagaaatcaggaaaggatcgttgcttcccaaccgaaagaaacatcaaatagaggtgctcacaaaaggtgctggacaaaggaggaggaagaattactaataagactggaggctcagttcgagggacacaaaaatattaataagcttattgcagaacacataaccaccaaaacagctaagcagatcagtgacaaaaggcgattgctgtccagaaagccagcagaggagccacgtatggagcctggaacgtgtcatcacaccaggagagcagctgcgagcctgagaacggagcctgagatgagtcatcaggcccaggcagaggacagagataatggacctgggagacgccctctgccaggcaggcccgctgccggagggagaacaatggacgagataagacgccaccctgataagggcaacggacagcagagacccaccaagcaaaaatcagaagaacagctgcaggcttactataaaaagacactagaggaacgactttcagctggggcacttaacaccttcccccgagcattcaagcaggtaatggaaggccgggatataaagctagtaatcaatcagacagcgcaggactgcttcggatgcctggaatccataagccaaataagaacggcaacccgagataaaaagtacacgggcacccgggagaaacacccaaagaggccttttcagaagtggatgaagaagagagcaatcaaaaaaggtaattatcttcggttccagcgtttattttatcttgatagagggaaactggctaaaatcattttagatgatattgaatgcttgtcttgtgacataccactcagtgaaatttattcggtttttaaaacaagatgggaaacaactggtagctttaaaagccttggggactttaaaacttacgggaaggctgacaacactgccttcagagaattaattacggctaaagaaattgagaaaaatgtgcaggaaatgagcaaaggctcggctcccggtccagacgggattactcttggggacgtcgtaaagatggatcccgagttttccctgaccatggagattttcaatttatggttaacaactggtaaaatcccggacatggtgagggggtgcagaaccgttttgattccaaaatcatcaaagccggatcgtttgaaagacattaataactggagacctatcacgatcggttccatcttgctgagactgttctccaggattgtaacagctaggctgagcaaagcgtgccccctgaacccaaggcaaagaggctttatcagagcggcgggatgctctgaaaacttaaaactcctgcaaactataatttggtcggccaaaagagaacacagaccactgggtgttgtattcgtggacatcgccaaggcttttgacaccgtaagccaccagcacatcattcatgctttgcagcaaagagaggtggatccccacatcgtcggtctggtgagcaatatgtacgagaacatcagtacgtatatcaccacaaagaggaacacacacacagacaaaatccagatccgggttggagtaaagcagggtgacccgatgtcgccccttttatttaacctggcaatggaccctctattatgcaagctggaagagagtggcaaaggataccaccgaggacagagcagcatcacagcgatggcatttgcagacgatctggttttgctgagcgactcctgggaaaatatgaatacaaatattagcatactggagaccttctgcaatctgaccggactcaaaacacaggggcaaaagtgccacggcttttacatcaagccgacaaaggactcttacaccatcaatgactgcgctgcctggactatcaacggcacacccctgaacatgatcgaccccggcgaatctgagaaatacctcggcctgcagtttgacccgtggattggaatagcaaggtccggtctctccacaaaactagatgagtggcttcagcggatcgatcaagcaccacttaaacctctgcagaaaactgatattctcaaaacatacaccatccctcggctgatctacatagctgaccactcagaagtgaaagccgcactactcgaaacccttgaccagaagatccggacagcggtcaaggaatggcttcacctacctccgtgcacctgcgatgccatcctgtactcgagcacgagagacggcggtttgggcatcaccaaattggcaggactgatccccagcgtgcaggcccgtagactgcatcggatcgcacagtcatctgacgatacgatgaaatgcttcatggaaaaagagaggatggaacagctgcataagaaattgtggattcaagctggaggggacagagagaacataccctcgatttgggaagcaccaccgtcgagtgaaccaccaaacaacgtgagcacaaattcggaatgggaagcaccgacccagaaacccaaatttccaaagccttgcaattggaggaaaaacgaattcaaaaaatggaccaaattggcatcccaaggccgcggaattgtaaattttgaaagagacaaaattagtaaccattggatccaatactacagaggcatacctcacaggaaactcctcactgcactacaactcagggccaacgtttaccccacgagagaatttctagccaggggtagacaagaccaatacatcaaggcgtgtaggcactgcgatgcggacattgaatcctgcgcccacatcatcggcaactgcccagtgacacaggacgcccgaatcaagaggcacaattacatctgcgaactgcttctcgaggaggcgaagaagaaggactgggtagtgttcaaggaaccgcacataagggattccaacaaggaactgtacaaacctgacctgatatttgtgaaggatggccgtgcacttgtcgtggatgtgacagtacggtatgaagcagccaaatcatcgctggaggaagccgctgcagagaaagtgagaaagtacaaacacctggaaacggaagtaagacatctcacgaatgcaaaggacgttacttttgtgggctttcccctaggagcgcgggggaaatggcaccaagataactttaaacttttgactgagcttggcctctccaaatcgaggcaagtgaaaatggcagagactttttccacagtagcgctcttttcatctgtggacattgtacatatgtttgccagtagggccagaaaatctatggttatgtgataataggctgccttctgcggggcttgccttctggccatgcccttcttctctcccttgcacctgtacctcttggtctttgaataaagcctgagtaggaaggaccggtaaaaaaaaaaaaaaaaaaaaaaaaaaaaaaacgttgactaaaaaaaaaaaaaaaaaaaaaaaaaaaaaaaaaaaaaaaaaaaaaaaaaaaaaaaaaaaaaaaaaaaaaa

SEQ ID NO: 11817 - DNA, 4564 bp, synthetic construct
  source 1..4564: mol_type = other DNA
ggtctagttacaactgggcatcgctgcagagatcgcacctcctcgtggtcccgctggtagcccttcgaagggtgactaagtcgatctctgccccaggtacggagccgttgggactcaccagtccaacgtaactcctgcctaaattcggtgaaacaaattcctcggtaaaaagccccatggcttcttgcccgaaacctggccccccggtttcagcaggggcaatgagtttggaaagtggactgaccacccactccgttctcgccatcgaacgtggtcccaattcgttggcaaattccggatcagactttgggggggggggtctggggctaccgttacgcctattgagggtatcggtcggcactcagacctcccgctccgactgggtagacctggtgtcctggagccacccaggacccacgtctaagtcccagcaggttgacctggtgtctttatttcctaaacaccgggttgacctgttatccaaaaacgaccaggtagacctggtggctcaatttttaccatctaaatttccccccaatttggcagaaaatgatttggctttgctggtgaacttagagttctacagatcggatttgcatgtgtatgagtgtgttcataaggctgcacattgggagggattaagtggtttgcctgaggtgtatgaacaacttgcaccacaaccgtgtgtgggagaaactttacattctagcctcccacgagacagtgaactgtttgtgcctgaagaggggagcagcgagaaggagagcgaggacgcgccaaaaacatctcctccgacgcctgggaaacatggtttggaacagactggggaggaaaaagtgatggtgactgttcctgacaaaaatccaccttgtccttgctgtggtacccgggtaaactctgtgttgaatctgattgaacatctgaaagtgtcacacgggaaaaggagggtttgttttcggtgtgcaaaatgtggaaaggaaaatagtaactatcacagtgttgtttgtcattttaagaaatgcaggggtccagagacggagaaagccccagctggggagtggatttgtgaggtatgcaacagagattttacaaccaaaattggcctgggacaacacaagagattggcacacccagcagtgagaaatcaggaaaggatcgttgcttcccaaccgaaagaaacatcaaatagaggtgctcacaaaaggtgctggacaaaggaggaggaagaattactaataagactggaggctcagttcgagggacacaaaaatattaataagcttattgcagaacacataaccaccaaaacagctaagcagatcagtgacaaaaggcgattgctgtccagaaagccagcagaggagccacgtatggagcctggaacgtgtcatcacaccaggagagcagctgcgagcctgagaacggagcctgagatgagtcatcacgcccaggcagaggacagagataatggacctgggagacgccctctgccaggcaggcccgctgccggagggagaacaatggacgagataagacgccaccctgataagggcaacggacagcagagacccaccaagcaaaaatcagaagaacagctgcaggcttactataaaaagacactagaggaacgactttcagctggggcacttaacaccttcccccgagcattcaagcaggtaatggaaggccgggatataaagctagtaatcaatcagacagcgcaggactgcttcggatgcctggaatccataagccaaataagaacggcaacccgagataaaaagtacacgggcacccgggagaaacacccaaagaggccttttcagaagtggatgaagaagagagcaatcaaaaaaggtaattatcttcggttccagcgtttattttatcttgatagagggaaactggctaaaatcattttagatgatattgaatgcttgtcttgtgacataccactcagtgaaatttattcggtttttaaaacaagatgggaaacaactggtagctttaaaagccttggggactttaaaacttacgggaaggctgacaacactgccttcagagaattaattacggctaaagaaattgagaaaaatgtgcaggaaatgagcaaaggctcggctcccggtccagacgggattactcttggggacgtcgtaaagatggatcccgagttttccctgaccatggagattttcaatttatggttaacaactggtaaaatcccggacatggtgagggggtgcagaaccgttttgattccaaaatcatcaaagccggatcgtttgaaagacattaataactggagacctatcacgatcggttccatcttgctgagactgttctccaggattgtaacagctaggctgagcaaagcgtgccccctgaacccaaggcaaagaggctttatcagagcggcgggatgctctgaaaacttaaaactcctgcaaactataatttggtcggccaaaagagaacacagaccactgggtgttgtattcgtggacatcgccaaggcttttgacaccgtaagccaccagcacatcattcatgctttgcagcaaagagaggtggatccccacatcgtcggtctggtgagcaatatgtacgagaacatcagtacgtatatcaccacaaagaggaacacacacacagacaaaatccagatccgggttggagtaaagcagggtgacccgatgtcgccccttttatttaacctggcaatggaccctctattatgcaagctggaagagagtggcaaaggataccaccgaggacagagcagcatcacagcgatggcatttgcagacgatctggttttgctgagcgactcctgggaaaatatgaatacaaatattagcatactggagaccttctgcaatctgaccggactcaaaacacaggggcaaaagtgccacggcttttacatcaagccgacaaaggactcttacaccatcaatgactgcgctgcctggactatcaacggcacacccctgaacatgatcgaccccggcgaatctgagaaatacctcggcctgcagtttgacccgtggattggaatagcaaggtccggtctctccacaaaactagatgagtggcttcagcggatcgatcaagcaccacttaaacctctgcagaaaactgatattctcaaaacatacaccatccctcggctgatctacatagctgaccactcagaagtgaaagccgcactactcgaaacccttgaccagaagatccggacagcggtcaaggaatggcttcacctacctccgtgcacctgcgatgccatcctgtactcgagcacgagagacggcggtttgggcatcaccaaattggcaggactgatccccagcgtgcaggcccgtagactgcatcggatcgcacagtcatctgacgatacgatgaaatgcttcatggaaaaagagaggatggaacagctgcataagaaattgtggattcaagctggaggggacagagagaacataccctcgatttgggaagcaccaccgtcgagtgaaccaccaaacaacgtgagcacaaattcggaatgggaagcaccgacccagaaacccaaatttccaaagccttgcaattggaggaaaaacgaattcaaaaaatggaccaaattggcatcccaaggccgcggaattgtaaattttgaaagagacaaaattagtaaccattggatccaatactacagacgcatacctcacaggaaactcctcactgcactacaactcagggccaacgtttaccccacgagagaatttctagccaggggtagacaagaccaatacatcaaggcgtgtaggcactgcgatgcggacattgaatcctgcgcccacatcatcggcaactgcccagtgacacaggacgcccgaatcaagaggcacaattacatctgcgaactgcttctcgaggaggcgaagaagaaggactgggtagtgttcaaggaaccgcacataagggattccaacaaggaactgtacaaacctgacctgatatttgtgaaggatggccgtgcacttgtcgtggatgtgacagtacggtatgaagcagccaaatcatcgctggaggaagccgctgcagagaaagtgagaaagtacaaacacctggaaacggaagtaagacatctcacgaatgcaaaggacgttacttttgtgggctttcccctaggagcgcgggggaaatggcaccaagataactttaaacttttgactgagcttggcctctccaaatcgaggcaagtgaaaatggcagagactttttccacagtagcgctcttttcatctgtggacattgtacatatgtttgccagtagggccagaaaatctatggttatgtgataataggctgccttctgcggggcttgccttctggccatgcccttcttctctcccttgcacctgtacctcttggtctttgaataaagcctgagtaggaaggaccggtaaaaaaaaaaaaaaaaaaaaaaaaaaaaaaacgttgactaaaaaaaaaaaaaaaaaaaaaaaaaaaaaaaaaaaaaaaaaaaaaaaaaaaaaaaaaaaaaaaaaaaaaa

SEQ ID NO: 11818 - DNA, 4564 bp, synthetic construct
  source 1..4564: mol_type = other DNA
ggtctagttacaactgggcatcgctgcagagatcgcacctcctcgtggtcccgctggtagcccttcgaagggtgactaagtcgatctctgccccaggtacggagccgttgggactcaccagtccaacgtaactcctgcctaaattcggtgaaacaaattcctcggtaaaaagccccatggcttcttgcccgaaacctggccccccggtttcagcaggggcaatgagtttggaaagtggactgaccacccactccgttctcgccatcgaacgtggtcccaattcgttggcaaattccggatcagactttgggggggggggtctggggctaccgttacgcctattgagggtatcggtcggcactcagacctcccgctccgactgggtagacctggtgtcctggagccacccaggacccacgtctaagtcccagcaggttgacctggtgtctttatttcctaaacaccgggttgacctgttatccaaaaacgaccaggtagacctggtggctcaatttttaccatctaaatttccccccaatttggcagaaaatgatttggctttgctggtgaacttagagttctacagatcggatttgcatgtgtatgagggcgttcataaggctgcacattgggagggattaagtggtttgcctgaggtgtatgaacaacttgcaccacaaccgtgtgtgggagaaactttacattctagcctcccacgagacagtgaactgtttgtgcctgaagaggggagcagcgagaaggagagcgaggacgcgccaaaaacatctcctccgacgcctgggaaacatggtttggaacagactggggaggaaaaagtgatggtgactgttcctgacaaaaatccaccttgtccttgctgtggtacccgggtaaactctgtgttgaatctgattgaacatctgaaagtgtcacacgggaaaaggggggtttgttttcggtgtgcaaaatgtggaaaggaaaatagtaactatcacagtgttgtttgtcattttaagaaatgcaggggtccagagacggagaaagccccagctggggagtggatttgtgaggtatgcaacagagattttacaaccaaaattggcctgggacaacacaagagaagggcacacccagcagtgagaaatcaggaaaggatcgttgcttcccaaccgaaagaaacatcaaatagaggtgctcacaaaaggtgctggacaaaggaggaggaagaattactaataagactggaggctcagttcgagggaaacaaaaatattaataagcttattgcagaacacataaccaccaaaacagctaagcagatcagtgacaaaaggcgattgctgtccagaaagccagcagaggagccacgtgagatgcctggaacgtgtcatcacaccaggagagcagctgcgagcctgagaacggagcctgagatgagtcatcacgcccaggcagaggacagagataatggacctgggagacgccctctgccaggcagggcagctgccggagggagaacaatggacgagataagacgccaccctgataagggcaacggacagcagagacccaccaagcaaaaatcagaagaacagctgcaggcttactataaaaagacactagaggaacgactttcagctggggcacttaacaccttcccccgagcattcaagcaggtaatggaaggccgggatataaagctagtaatcaatcagacagcgcaggactacttcggatgcctggaatccataagccaaataagaacggcaacccgagataaaaaggacacggtgacccggaagaaacacccaaagaaaccttttcagaagtggatgaagaagagagcaatcaaaaaaggtaattatcttcggttccagcgtttatttcaccttgatagagggaaactggctaaaatcattttagatgatattgaatgcttgtcttgtgacataccactcagtgaaatttattcggtttttaaaacaagatgggaaacaactggtagctttaaaagccttggggactttaaaacttacgggaaggctgacaacactgccttcagagacttaattacggctaaagaaattgagaaaaatgtgcaggaaatgagcaaaggctcggctcccggtccagacgggattactcttggggacgtcgtaaagatggatcccgagggctcccggaccgccgagattttcaatttatggttaacaactggtaaaatcccggacatggtgagggggtgcagaaccgttttgattccaaaatcatcagacccggatcgtttgaaagacattaataactggagacctatcacgatcggttccatcttgctgagactgttctccaggattgtaacagctaggctgagcaaagcgtgccccctgaacccaaggcaaagaggctttatcagagcggcgggatgctctgaaaacttaaaactcctgcaaactataatttggtcggccaaaagagaacacagaccactgggtgttgtattcgtggacatcgccaaggcttttgacaccgtaagccaccagcacatcattcatgctttgcagcaaagagaggtggatccccacatcgtcggtctggtgagcaatatgtacgagaacatcagtacgtatatcaccacaaagaggaacacacacacagacaaaatccagatccgggttggagtaaagcagggtgacccgatgtcgccccttttatttaacctggcaatggaccctctattatgcaagctggaagagagtggcaaaggataccaccgaggacagagcagcatcacagcgatggcatttgcagacgatctggttttgctgagcgactcctgggaaggcatgaatacaaatattagcatactggagaccttctgcaatctgaccggactcaaaacacaggggcaaaagtgccacggcttttacatcaagccgacaaagaagtcttacaccatcaatgactgcgctgcctggactatcaacggcacacccctgaacatgatcgaccccggcgaatctgagaaatacctcggcctgcagtttgacccgtggattggaatagcaaggtccggtctctccacaaaactagatttttggcttcagcggatcgatcaagcaccacttaaacctctgcagaaactggatattctcaaaacatacaccatccctcggctgatctacatagctgaccactcagaagtgaaaactgcactactcgaaacccttgaccagaagatccggacagcggtcaaggaatggcttcacctacctccgtgcacctgcgatgccatcctgtactcgagcacgagagacggcggtttgggcatcaccaaattggcaggactgatccccagcgtgcaggcccgtagactgcatcggatcgcacagtcatctgacgagacgatgaaatgcttcatggaaaaagagaaaatggaacagctgcataagaaattgtggattcaagctggaggggacagagagaacataccctcgatttgggaagcaccaccgtcgagtgaaccaccaaacaacgtgagcacaaattcggaatgggaagcaccgacccagaaagataaatttccaaagccttgcaattggaggaaaaacgaattcaaaaaatggaccaaattggcatcccaaggccgcggaattgtaaattttgaaagagacaaaattagtaaccattggatccaatactacagacgcatacctcacaggaaactcctcactgcactacaactcagggccaacgtttaccccacgagagaatttctagccaggggtagacaagaccaatacatcaaggcgtgtaggcactgcgatgcggacattgaatcctgcgcccacatcatcggcaactgcccagtgacacaggacgcccgaatcaagaggcacaataagatctgcgaactgcttctcgaggaggcgaagaagaaggactgggtagtgttcaaggaaccgcacataagggattccaacaaggaactgtacaaacctgacctgatatttgtgaaggatgcccgtgcacttgtcgtggatgtgacagtacggtatgaagcagccaaatcatcgctggaggaagccgctgcagagaaagtgagaaagtacaaacacctggaaacggaagtaagacatctcacgaatgcaaaggacgttacttttgtgggctttcccctaggagcgcgggggaaatggcaccaagataactttaaacttttgactgagcttggcctctccaaatcgaggcaagtgaaaatggcagagactttttccacagtagcgctcttttcatctgtggacattgtacatatgtttgccagtagggccagaaaatctatggttatgtgataataggctgccttctgcggggcttgccttctggccatgcccttcttctctcccttgcacctgtacctcttggtctttgaataaagcctgagtaggaaggaccggtaaaaaaaaaaaaaaaaaaaaaaaaaaaaaaacgttgactaaaaaaaaaaaaaaaaaaaaaaaaaaaaaaaaaaaaaaaaaaaaaaaaaaaaaaaaaaaaaaaaaaaaaa

SEQ ID NO: 11819 - DNA, 4564 bp, synthetic construct
  source 1..4564: mol_type = other DNA
ggtctagttacaactgggcatcgctgcagagatcgcacctcctcgtggtcccgctggtagcccttcgaagggtgactaagtcgatctctgccccaggtacggagccgttgggactcaccagtccaacgtaactcctgcctaaattcggtgaaacaaattcctcggtaaaaagccccatggcttcttgcccgaaacctggccccccggtttcagcaggggcaatgagtttggaaagtggactgaccacccactccgttctcgccatcgaacgtggtcccaattcgttggcaaattccggatcagactttgggggggggggtctggggctaccgttacgcctattgagggtatcggtcggcactcagacctcccgctccgactgggtagacctggtgtcctggagccacccaggacccacgtctaagtcccagcaggttgacctggtgtctttatttcctaaacaccgggttgacctgttatccaaaaacgaccaggtagacctggtggctcaatttttaccatctaaatttccccccaatttggcagaaaatgatttggctttgctggtgaacttagagttctacagatcggatttgcatgtgtatgagggcgttcataaggctgcacattgggagggattaagtggtttgcctgaggtgtatgaacaacttgcaccacaaccgtgtgtgggagaaactttacattctagcctcccacgagacagtgaactgtttgtgcctgaagaggggagcagcgagaaggagagcgaggacgcgccaaaaacatctcctccgacgcctgggaaacatggtaagaggcagactggggaggaaaaagtgatggtgactgttcctgacaaaaatccaccttgtccttgctgtggtacccgggtaaactctgtgttgaatctgattgaacatctgaaagtgtcacacgggaaaaggagggtttgttttcggtgtgcaaaatgtggaaaggaaaatagtaactatcacagtgttgtttgtcattttaagaaatgcaggggtccagagacggagaaagccccagctggggagtggatttgtgaggtatgcaacagagattttacaaccaaaattggcctgggacaacacaagagattggcacacccagcagtgagaaatcaggaaaggatcgttgcttcccaaccgaaagaaacatcaaatagaggtgctcacaaaaggtgctggacaaaggaggaggaagaattactaataagactggaggctcagttcgagggaaacaaaaatattaataagcttattgcagaacacataaccaccaaaacagctaagcagatcagtgacaaaaggcgattgctgtccagaaagccagcagaggagccacgtgaggagcctggaacgtgtcatcacaccaggagagcagctgcgagcctgagaacggagcctgagatgagtcatcacgcccaggcagaggacagagataatggacctgggagacgccctctgccaggcagggcagctgccggagggagaacaatggacgagataagacgccaccctgataagggcaacggacagcagagacccaccaagcaaaaatcagaagaacagctgcaggcttactataaaaagacactagaggaacgactttcagctggggcacttaacaccttcccccgagcattcaagcaggtaatggaaggccgggatataaagctagtaatcaatcagacagcgcaggactacttcggatgcctggaatccataagccaaataagaacggcaacccgagataaaaagtacacggtgacccggaagaaacacccaaagaaaccttttcagaagtggatgaagaagagagcaatcaaaaaaggtaattatcttcggttccagcgtttattttatcttgatagagggaaactggctaaaatcattttagatgatattgaatgcttgtcttgtgacataccactcagtgaaatttattcggtttttaaaacaagatgggaaacaactggtagctttaaaagccttggggactttaaaacttacgggaaggctgacaacactgccttcagagacttaattacggctaaagaaattgagaaaaatgtgcaggaaatgagcaaaggctcggctcccggtccagacgggattactcttggggacgtcgtaaagatggatcccgagggctcccggaccatggagattttcaatttatggttaacaactggtaaaatcccggacatggtgagggggtgcagaaccgttttgattccaaaatcatcagacccggatcgtttgaaagacattaataactggagacctatcacgatcggttccatcttgctgagactgttctccaggattgtaacagctaggctgagcaaagcgtgccccctgaacccaaggcaaagaggctttatcagagcggcgggatgctctgaaaacttaaaactcctgcaaactataatttggtcggccaaaagagaacacagaccactgggtgttgtattcgtggacatcgccaaggcttttgacaccgtaagccaccagcacatcattcatgctttgcagcaaagagaggtggatccccacatcgtcggtctggtgagcaatatgtacgagaacatcagtacgtatatcaccacaaagaggaacacacacacagacaaaatccagatccgggttggagtaaagcagggtgacccgatgtcgccccttttatttaacctggcaatggaccctctattatgcaagctggaagagagtggcaaaggataccaccgaggacagagcagcatcacagcgatggcatttgcagacgatctggttttgctgagcgactcctgggaaggcatgaatacaaatattagcatactggagaccttctgcaatctgaccggactcaaaacacaggggcaaaagtgccacggcttttacatcaagccgacaaagaagtcttacaccatcaatgactgcgctgcctggactatcaacggcacacccctgaacatgatcgaccccggcgaatctgagaaatacctcggcctgcagtttgacccgtggattggaatagcaaggtccggtctctccacaaaactagatttttggcttcagcggatcgatcaagcaccacttaaacctctgcagaaactggatattctcaaaacatacaccatccctcggctgatctacatagctgaccactcagaagtgaaaactgcactactcgaaacccttgaccagaagatccggacagcggtcaaggaatggcttcacctacctccgtgcacctgcgatgccatcctgtactcgagcacgagagacggcggtttgggcatcaccaaattggcaggactgatccccagcgtgcaggcccgtagactgcatcggatcgcacagtcatctgacgatacgatgaaatgcttcatggaaaaagagaaaatggaacagctgcataagaaattgtggattcaagctggaggggacagagagaacataccctcgatttgggaagcaccaccgtcgagtgaaccaccaaacaacgtgagcacaaattcggaatgggaagcaccgacccagaaagataaatttccaaagccttgcaattggaggaaaaacgaattcaaaaaatggaccaaattggcatcccaaggccgcggaattgtaaattttgaaagagacaaaattagtaaccattggatccaatactacagacgcatacctcacaggaaactcctcactgcactacaactcagggccaacgtttaccccacgagagaatttctagccaggggtagacaagaccaatacatcaaggcgtgtaggcactgcgatgcggacattgaatcctgcgcccacatcatcggcaactgcccagtgacacaggacgcccgaatcaagaggcacaataagatctgcgaactgcttctcgaggaggcgaagaagaaggactgggtagtgttcaaggaaccgcacataagggattccaacaaggaactgtacaaacctgacctgatatttgtgaaggatggccgtgcacttgtcgtggatgtgacagtacggtatgaagcagccaaatcatcgctggaggaagccgctgcagagaaagtgagaaagtacaaacacctggaaacggaagtaagacatctcacgaatgcaaaggacgttacttttgtgggctttcccctaggagcgcgggggaaatggcaccaagataactttaaacttttgactgagcttggcctctccaaatcgaggcaagtgaaaatggcagagactttttccacagtagcgctcttttcatctgtggacattgtacatatgtttgccagtagggccagaaaatctatggttatgtgataataggctgccttctgcggggcttgccttctggccatgcccttcttctctcccttgcacctgtacctcttggtctttgaataaagcctgagtaggaaggaccggtaaaaaaaaaaaaaaaaaaaaaaaaaaaaaaacgttgactaaaaaaaaaaaaaaaaaaaaaaaaaaaaaaaaaaaaaaaaaaaaaaaaaaaaaaaaaaaaaaaaaaaaaa

SEQ ID NO: 11820 - DNA, 4564 bp, synthetic construct
  source 1..4564: mol_type = other DNA
ggtctagttacaactgggcatcgctgcagagatcgcacctcctcgtggtcccgctggtagcccttcgaagggtgactaagtcgatctctgccccaggtacggagccgttgggactcaccagtccaacgtaactcctgcctaaattcggtgaaacaaattcctcggtaaaaagccccatggcttcttgcccgaaacctggccccccggtttcagcaggggcaatgagtttggaaagtggactgaccacccactccgttctcgccatcgaacgtggtcccaattcgttggcaaattccggatcagactttgggggggggggtctggggctaccgttacgcctattgagggtatcggtcggcactcagacctcccgctccgactgggtagacctggtgtcctggagccacccaggacccacgtctaagtcccagcaggttgacctggtgtctttatttcctaaacaccgggttgacctgttatccaaaaacgaccaggtagacctggtggctcaatttttaccatctaaatttccccccaatttggcagaaaatgatttggctttgctggtgaacttagagttctacagatcggatttgcatgtgtatgagtgtgttcataaggctgcacattgggagggattaagtggtttgcctgaggtgtatgaacaacttgcaccacaaccgtgtgtgggagaaactttacattctagcctcccacgagacagtgaactgtttgtgcctgaagaggggagcagcgagaaggagagcgaggacgcgccaaaaacatctcctccgacgcctgggaaacatggtttggaacagactggggaggaaaaagtgatggtgactgttcctgacaaaaatccaccttgtccttgctgtggtacccgggtaaactctgtgttgaatctgattgaacatctgaaagtgtcacacgggaaaaggagggtttgttttcggtgtgcaaaatgtggaaaggaaaatagtaactatcacagtgttgtttgtcattttccaaaatgcaggggtccagagacggagaaagccccagctggggagtggatttgtgaggtatgcaacagagattttacaaccaaaattggcctgggacaacacaagagattggcacacccagcagtgagaaatcaggaaaggatcgttgcttcccaaccgaaagaaacatcaaatagaggtgctcacaaaaggtgctggacaaaggaggaggaagaattactaataagactggaggctcagttcgagggacacaaaaatattaataagcttattgcagaacacataaccaccaaaacagctaagcagatcagtgacaaaaggcgattgctgtccagaaagccagcagaggagccacgtgaggagcctggaacgtgtcatcacaccaggagagcagctgcgagcctgagaacggagcctgagatgagtcatcacgcccaggcagaggacagagataatggacctgggagacgccctctgccaggcaggcccgctgccggagggagaacaatggacgagataagacgccaccctgataagggcaacggacagcagagacccaccaagcaaaaatcagaagaacagctgcaggcttactataaaaagacactagaggaacgactttcagctggggcacttaacaccttcccccgagcattcaagcaggtaatggaaggccgggatataaagctagtaatcaatcagacagcgcaggactgcttcggatgcctggaatccataagccaaataagaacggcaacccgagataaaaagtacacggtgacccgggagaaacacccaaagaggccttttcagaagtggatgaaggacagagcaatcaaaaaaggtaattatcttcggttccagcgtttattttatcttgatagagggaaactggctaaaatcattttagatgatattgaatgcttgtcttgtgacataccactcagtgaaatttattcggtttttaaaacaagatgggaaacaactggtagctttaaaagccttggggactttaaaacttacgggaaggctgacaacactgccttcagagaattaattacggctaaagaaattgagaaaaatgtgcaggaaatgagcaaaggctcggctcccggtccagacgggattactcttggggacgtcgtaaagatggatcccgagttttccctgaccatggagattttcaatttatggttaacaactggtaaaatcccggacatggtgagggggtgcagaaccgttttgattccaaaatcatcaaagccggatcgtttgaaagacattaataactggagacctatcacgatcggttccatcttgctgagactgttctccaggattgtaacagctaggctgagcaaagcgtgccccctgaacccaaggcaaagaggctttatcagagcggcgggatgctctgaaaacttaaaactcctgcaaactataatttggtcggccaaaagagaacacagaccactgggtgttgtattcgtggacatcgccaaggcttttgacaccgtaagccaccagcacatcattcatgctttgcagcaaagagaggtggatccccacatcgtcggtctggtgagcaatatgtacgagaacatcagtacgtatatcaccacaaagaggaacacacacacagacaaaatccagatccgggttggagtaaagcagggtgacccgatgtcgccccttttatttaacctggcaatggaccctctattatgcaagctggaagagagtggcaaaggataccaccgaggacagagcagcatcacagcgatggcatttgcagacgatctggttttgctgagcgactcctgggaaaatatgaatacaaatattagcatactggagaccttctgcaatctgaccggactcaaaacacaggggcaaaagtgccacggcttttacatcaagccgacaaaggactcttacaccatcaatgactgcgctgcctggactatcaacggcacacccctgaacatgatcgaccccggcgaatctgagaaatacctcggcctgcagtttgacccgtggattggaatagcaaggtccggtctctccacaaaactagatgagtggcttcagcggatcgatcaagcaccacttaaacctctgcagaaaactgatattctcaaaacatacaccatccctcggctgatctacatagctgaccactcagaagtgaaagccgcactactcgaaacccttgaccagaagatccggacagcggtcaaggaatggcttcacctacctccgtgcacctgcgatgccatcctgtactcgagcacgagagacggcggtttgggcatcaccaaattggcaggactgatccccagcgtgcaggcccgtagactgcatcggatcgcacagtcatctgacgatacgatgaaatgcttcatggaaaaagagaggatggaacagctgcataagaaattgtggattcaagctggaggggacagagagaacataccctcgatttgggaagcaccaccgtcgagtgaaccaccaaacaacgtgagcacaaattcggaatgggaagcaccgacccagaaacccaaatttccaaagccttgcaattggaggaaaaacgaattcaaaaaatggaccaaattggcatcccaaggccgcggaattgtaaattttgaaagagacaaaattagtaaccattggatccaatactacagacgcatacctcacaggaaactcctcactgcactacaactcagggccaacgtttaccccacgagagaatttctagccaggggtagacaagaccaatacatcaaggcgtgtaggcactgcgatgcggacattgaatcctgcgcccacatcatcggcaactgcccagtgacacaggacgcccgaatcaagaggcacaattacatctgcgaactgcttctcgaggaggcgaagaagaaggactgggtagtgttcaaggaaccgcacataagggattccaacaaggaactgtacaaacctgacctgatatttgtgaaggatggccgtgcacttgtcgtggatgtgacagtacggtatgaagcagccaaatcatcgctggaggaagccgctgcagagaaagtgagaaagtacaaacacctggaaacggaagtaagacatctcacgaatgcaaaggacgttacttttgtgggctttcccctaggagcgcgggggaaatggcaccaagataactttaaacttttgactgagcttggcctctccaaatcgaggcaagtgaaaatggcagagactttttccacagtagcgctcttttcatctgtggacattgtacatatgtttgccagtagggccagaaaatctatggttatgtgataataggctgccttctgcggggcttgccttctggccatgcccttcttctctcccttgcacctgtacctcttggtctttgaataaagcctgagtaggaaggaccggtaaaaaaaaaaaaaaaaaaaaaaaaaaaaaaacgttgactaaaaaaaaaaaaaaaaaaaaaaaaaaaaaaaaaaaaaaaaaaaaaaaaaaaaaaaaaaaaaaaaaaaaaa

SEQ ID NO: 11821 - DNA, 5639 bp, synthetic construct
  source 1..5639: mol_type = other DNA
gaaataagagagaaaagaagagtaagaagaaatataagagaattcgccaccatggcccctaagaaaaagcggaaggtgaatatcagcggctctagctgcggcagccccaacagcgccgacaccagcagcgacttcaaggacctgtggaccaagctgaaggaatgccacgaccgggaagtgcagggactccaggtgaaggtcaccaaactcaagcaagaaagaatcctggacgcccagagactggaagaattcttcaccaagaaccagcagctgagagagcagcagaaagtgctgcacgagacaatcaaggttctggaagatagactgcgggccggcctgtgcgacagatgcgccgtgaccgaggaacacatgcgcaaaaagcagcaggagttcgagaacattagacagcaaaatctgaaattgatcacagagctgatgaacgagagaaacacactgcaggaggagaacaagaagctgagcgagcagctgcaacagaagatcgagaatgatcagcaacaccaggccgctgagctggaatgtgaagaggacgtgatccccgacagcccaatcacagctttcagcttttctggcgtgaacagactgaggcggaaggaaaacccccacgtgcggtacatcgagcagacccataccaagctggaacacagcgtgtgtgccaacgagatgagaaaggtgtccaagtcctccacccatccccagcacaaccctaacgaaaatgagatcctggtggctgatacctacgaccagtctcagagccctatggccaaggcccacggcaccagctcttatacccctgataagagctccttcaacctggccaccgtggtggccgagacactgggcctgggcgtgcaggaggaaagcgagacacagggcccaatgagccctctgggagatgagctgtaccactgcctggaaggcaaccacaagaaacagccttttgagtccggctccgagactcctggaacaagcgagagcgctacacctgagggcagccctaagagaaaggtgtccagcgccgagggcgctgccaaggaagagcctaaacggagaagcgccagactgagcgccaagccccccgccaaggtggaagccaagcctaagaaggccgccgctaaggacaagagcagcgataagaaagtccagaccaagggcaagcggggcgccaaaggcaaacaggccgaggtggccaaccaggagacaaaggaagatctgcctgctgagaacggcgaaaccaagaccgaggaatctccagcttctgacgaggccggagagaaggaggccaaaagcgacagcggctctgagacacctggaacaagcgagagcgccaccccggaatcctatgaacaacttgcaccacaaccgtgtgtgggagaaactttacattctagcctcccacgagacagtgaactgtttgtgcctgaagaggggagcagcgagaaggagagcgaggacgcgccaaaaacatctcctccgacgcctgggaaacatggtttggaacagactggggaggaaaaagtgatggtgactgttcctgacaaaaatccaccttgtccttgctgtggtacccgggtaaactctgtgttgaatctgattgaacatctgaaagtgtcacacgggaaaaggggggtttgttttcggtgtgcaaaatgtggaaaggaaaatagtaactatcacagtgttgtttgtcattttaagaaatgcaggggtccagagacggagaaagccccagctggggagtggatttgtgaggtatgcaacagagattttacaaccaaaattggcctgggacaacacaagagattggcacacccagcagtgagaaatcaggaaaggatcgttgcttcccaaccgaaagaaacatcaaatagaggtgctcacaaaaggtgctggacaaaggaggaggaagaattactaataagactggaggctcagttcgagggaaacaaaaatattaataagcttattgcagaacacataaccaccaaaacagctaagcagatcagtgacaaaaggcgattgctgtccagaaagccagcagaggagccacgtgaggagcctggaacgtgtcatcacaccaggagagcagctgcgagcctgagaacggagcctgagatgagtcatcacgcccaggcagaggacagagataatggacctgggagacgccctctgccaggcagggcagctgccggagggagaacaatggacgagataagacgccaccctgataagggcaacggacagcagagacccaccaagcaaaaatcagaagaacagctgcaggcttactataaaaagacactagaggaacgactttcagctggggcacttaacaccttcccccgagcattcaagcaggtaatggaaggccgggatataaagctagtaatcaatcagacagcgcaggactgcttcggatgcctggaatccataagccaaataagaacggcaacccgagataaaaaggacacggtgacccgggagaaacacccaaagaaaccttttcagaagtggatgaagaagagagcaatcaaaaaaggtaattatcttcggttccagcgtttattttatcttgatagagggaaactggctaaaatcattttagatgatattgaatgcttgtcttgtgacataccactcagtgaaatttattcggtttttaaaacaagatgggaaacaactggtagctttaaaagccttggggactttaaaacttacgggaaggctgacaacactgccttcagagaattaattacggctaaagaaattgagaaaaatgtgcaggaaatgagcaaaggctcggctcccggtccagacgggattactcttggggacgtcgtaaagatggatcccgagttttcccggaccatggagattttcaatttatggttaacaactggtaaaatcccggacatggtgagggggtgcagaaccgttttgattccaaaatcatcaaagccggatcgtttgaaagacattaataactggagacctatcacgatcggttccatcttgctgagactgttctccaggattgtaacagctaggctgagcaaagcgtgccccctgaacccaaggcaaagaggctttatcagagcggcgggatgctctgaaaacttaaaactcctgcaaactataatttggtcggccaaaagagaacacagaccactgggtgttgtattcgtggacatcgccaaggcttttgacaccgtaagccaccagcacatcattcatgctttgcagcaaagagaggtggatccccacatcgtcggtctggtgagcaatatgtacgagaacatcagtacgtatatcaccacaaagaggaacacacacacagacaaaatccagatccgggttggagtaaagcagggtgacccgatgtcgccccttttatttaacctggcaatggaccctctattatgcaagctggaagagagtggcaaaggataccaccgaggacagagcagcatcacagcgatggcatttgcagacgatctggttttgctgagcgactcctgggaaaatatgaatacaaatattagcatactggagaccttctgcaatctgaccggactcaaaacacaggggcaaaagtgccacggcttttacatcaagccgacaaaggactcttacaccatcaatgactgcgctgcctggactatcaacggcacacccctgaacatgatcgaccccggcgaatctgagaaatacctcggcctgcagtttgacccgtggattggaatagcaaggtccggtctctccacaaaactagatttttggcttcagcggatcgatcaagcaccacttaaacctctgcagaaaactgatattctcaaaacatacaccatccctcggctgatctacatagctgaccactcagaagtgaaaagcgcactactcgaaacccttgaccagaagatccggacagcggtcaaggaatggcttcacctacctccgtgcacctgcgatgccatcctgtactcgagcacgagagacggcggtttgggcatcaccaaattggcaggactgatccccagcgtgcaggcccgtagactgcatcggatcgcacagtcatctgacgatacgatgaaatgcttcatggaaaaagagaaaatggaacagctgcataagaaattgtggattcaagctggaggggacagagagaacataccctcgatttgggaagcaccaccgtcgagtgaaccaccaaacaacgtgagcacaaattcggaatgggaagcaccgacccagaaagataaatttccaaagccttgcaattggaggaaaaacgaattcaaaaaatggaccaaattggcatcccaaggccgcggaattgtaaattttgaaagagacaaaattagtaaccattggatccaatactacagacgcatacctcacaggaaactcctcactgcactacaactcagggccaacgtttaccccacgagagaatttctagccaggggtagacaagaccaatacatcaaggcgtgtaggcactgcgatgcggacaacgaatcctgcgcccacatcatcggcaactgcccagtgacacaggacgcccgaatcaagaggcacaattacatctgcgaactgcttctcgaggaggcgaagaagaaggactgggtagtgttcaaggaaccgcacataagggattccaacaaggaactgtacaaacctgacctgatatttgtgaaggatgggcgtgcacttgtcgtggatgtgacagtacggtatgaagcagccaaatcatcgctggaggaagccgctgcagagaaagtgagaaagtacaaacacctggaaacggaagtaagacatctcacgaatgcaaaggacgttacttttgtgggctttcccctaggagcgcgggggaaatggcaccaagataactttaaacttttgactgagcttggcctctccaaatcgaggcaagtgaaaatggcagagactttttccacagtagcgctcttttcatctgtggacattgtacatatgtttgccagtagggccagaaaatctatggttatgtccggctccgagactcctggaacaagcgagagcgctacacctgagggcagcgccgcttctctgaacggcgcccctctgattaaggaccctatgctgatcttcgtgaaaacactgaccggcaagaccatcacactggaggtggaacctagcgacaccatcgagaatgtgaaggccaagatccaggacaaggaaggcatcccccccgaccagcagagactggccttcgccggaaaaagcctggaggacggcagaaccctgtccgattacaacatcctgaaggacagcaagctgcacccactgctgcggctgagaggcggatctggcaaaagaaccgccgacggcagcgaattcgagcccaagaagaagaggaaagtctgataataggctgccttctgcggggcttgccttctggccatgcccttcttctctcccttgcacctgtacctcttggtctttgaataaagcctgagtaggaaggaccggtaaaaaaaaaaaaaaaaaaaaaaaaaaaaaaacgttgactaaaaaaaaaaaaaaaaaaaaaaaaaaaaaaaaaaaaaaaaaaaaaaaaaaaaaaaaaaaaaaaaaaaaaa

SEQ ID NO: 11822 - DNA, 4564 bp, synthetic construct
  source 1..4564: mol_type = other DNA
ggtctagttacaactgggcatcgctgcagagatcgcacctcctcgtggtcccgctggtagcccttcgaagggtgactaagtcgatctctgccccaggtacggagccgttgggactcaccagtccaacgtaactcctgcctaaattcggtgaaacaaattcctcggtaaaaagccccatggcttcttgcccgaaacctggccccccggtttcagcaggggcaatgagtttggaaagtggactgaccacccactccgttctcgccatcgaacgtggtcccaattcgttggcaaattccggatcagactttgggggggggggtctggggctaccgttacgcctattgagggtatcggtcggcactcagacctcccgctccgactgggtagacctggtgtcctggagccacccaggacccacgtctaagtcccagcaggttgacctggtgtctttatttcctaaacaccgggttgacctgttatccaaaaacgaccaggtagacctggtggctcaatttttaccatctaaatttccccccaatttggcagaaaatgatttggctttgctggtgaacttagagttctacagatcggatttgcatgtgtatgagggcgttcataaggctgcacattgggagggattaagtggtttgcctgaggtgtatgaacaacttgcaccacaaccgtgtgtgggagaaactttacattctagcctcccacgagacagtgaactgtttgtgcctgaagaggggagcagcgagaaggagagcgaggacgcgccaaaaacatctcctccgacgcctgggaaacatggtaagaggcagactggggaggaaaaagtgatggtgactgttcctgacaaaaatccaccttgtccttgctgtggtacccgggtaaactctgtgttgaatctgattgaacatctgaaagtgtcacacgggaaaaggggggtttgttttcggtgtgcaaaatgtggaaaggaaaatagtaactatcacagtgttgtttgtcattttaagaaatgcaggggtccagagacggagaaagccccagctggggagtggatttgtgaggtatgcaacagagattttacaaccaaaattggcctgggacaacacaagagaagggcacacccagcagtgagaaatcaggaaaggatcgttgcttcccaaccgaaagaaacatcaaatagaggtgctcacaaaaggtgctggacaaaggaggagagggaattactaataagactggaggctcagttcgagggaaacaaaaatattaataagcttattgcagaacacataaccaccaaaacagctaagcagatcagtgacaaaaggcgattgctgtccagaaagccagcagaggagccacgtgagatgcctggaacgtgtcatcacaccaggagagcagctgcgagcctgagaacggagcctgagatgagtcatcacgcccaggcagaggacagagataatggacctgggagacgccctctgccaggcagggcagctgccggagggagaacaatggacgagataagacgccaccctgataagggcaacggacagcagagacccaccaagcaaaaatcagaagaacagctgcaggcttactataaaaagacactagaggaacgactttcagctggggcacttaacaccttcccccgagcattcaagcaggtaatggaaggccgggatataaagctagtaatcaatcagacagcgcaggactacttcggatgcctggaatccataagccaaataagaacggcaacccgagataaaaaggacacggtgacccggaagaaacacccaaagaaaccttttcagaagtggatgaagaagagagcaatcaaaaaaggtaattatcttcggttccagcgtttatttcaccttgatagagggaaactggctaaaatcattttagatgatattgaatgcttgtcttgtgacataccactcagtgaaatttattcggtttttaaaacaagatgggaaacaactggtagctttaaaagccttggggactttaaaacttacgggaaggctgacaacactgccttcagagacttaattacggctaaagaaattgagaaaaatgtgcaggaaatgagcaaaggctcggctcccggtccagacgggattactcttggggacgtcgtaaagatggatcccgagggctcccggaccgccgagattttcaatttatggttaacaactggtaaaatcccggacatggtgagggggtgcagaaccgttttgattccaaaatcatcagacccggatcgtttgaaagacattaataactggagacctatcacgatcggttccatcttgctgagactgttctccaggattgtaacagctaggctgagcaaagcgtgccccctgaacccaaggcaaagaggctttatcagagcggcgggatgctctgaaaacttaaaactcctgcaaactataatttggtcggccaaaagagaacacagaccactgggtgttgtattcgtggacatcgccaaggcttttgacaccgtaagccaccagcacatcattcatgctttgcagcaaagagaggtggatccccacatcgtcggtctggtgagcaatatgtacgagaacatcagtacgtatatcaccacaaagaggaacacacacacagacaaaatccagatccgggttggagtaaagcagggtgacccgatgtcgccccttttatttaacctggcaatggaccctctattatgcaagctggaagagagtggcaaaggataccaccgaggacagagcagcatcacagcgatggcatttgcagacgatctggttttgctgagcgactcctgggaaggcatgaatacaaatattagcatactggagaccttctgcaatctgaccggactcaaaacacaggggcaaaagtgccacggcttttacatcaagccgacaaagaagtcttacaccatcaatgactgcgctgcctggactatcaacggcacacccctgaacatgatcgaccccggcgaatctgagaaatacctcggcctgcagtttgacccgtggattggaatagcaaggtccggtctctccacaaaactagatttttggcttcagcggatcgatcaagcaccacttaaacctctgcagaaactggatattctcaaaacatacaccatccctcggctgatctacatagctgaccactcagaagtgaaaactgcactactcgaactgcttgaccagaagatccggacagcggtcaaggaatggcttcacctacctccgtgcacctgcgatgccatcctgtactcgagcacgagagacggcggtttgggcatcaccaaattggcaggactgatccccagcgtgcaggcccgtagactgcatcggatcgcacagtcatctgacgagacgatgaaatgcttcatggaaaaagagaaaatggaacagctgcataagaaattgtggattcaagctggaggggacagagagaacataccctcgatttgggaagcaccaccgtcgagtgaaccaccaaacaacgtgagcacaaattcggaatgggaagcaccgacccagaaagataaatttccaaagccttgcaattggaggaaaaacgaattcaaaaaatggaccaaattggcatcccaaggccgcggaattgtaaattttgaaagagacaaaattagtaaccattggatccaatactacagacgcatacctcacaggaaactcctcactgcactacaactcagggccaacgtttaccccacgagagaatttctagccaggggtagacaagaccaatacatcaaggcgtgtaggcactgcgatgcggacattgaatcctgcgcccacatcatcggcaactgcccagtgacacaggacgcccgaatcaagaggcacaataagatctgcgaactgcttctcgaggaggcgaagaagaaggactgggtagtgttcaaggaaccgcacataagggattccaacaaggaactgtacaaacctgacctgatatttgtgaaggatgcccgtgcacttgtcgtggatgtgacagtacggtatgaagcagccaaatcatcgctggaggaagccgctgcagagaaagtgagaaagtacaaacacctggaaacggaagtaagacatctcacgaatgcaaaggacgttacttttgtgggctttcccctaggagcgcgggggaaatggcaccaagataactttaaacttttgactgagcttggcctctccaaatcgaggcaagtgaaaatggcagagactttttccacagtagcgctcttttcatctgtggacattgtacatatgtttgccagtagggccagaaaatctatggttatgtgataataggctgccttctgcggggcttgccttctggccatgcccttcttctctcccttgcacctgtacctcttggtctttgaataaagcctgagtaggaaggaccggtaaaaaaaaaaaaaaaaaaaaaaaaaaaaaaacgttgactaaaaaaaaaaaaaaaaaaaaaaaaaaaaaaaaaaaaaaaaaaaaaaaaaaaaaaaaaaaaaaaaaaaaaa

SEQ ID NO: 11823 - DNA, 4564 bp, synthetic construct
  source 1..4564: mol_type = other DNA
ggtctagttacaactgggcatcgctgcagagatcgcacctcctcgtggtcccgctggtagcccttcgaagggtgactaagtcgatctctgccccaggtacggagccgttgggactcaccagtccaacgtaactcctgcctaaattcggtgaaacaaattcctcggtaaaaagccccatggcttcttgcccgaaacctggccccccggtttcagcaggggcaatgagtttggaaagtggactgaccacccactccgttctcgccatcgaacgtggtcccaattcgttggcaaattccggatcagactttgggggggggggtctggggctaccgttacgcctattgagggtatcggtcggcactcagacctcccgctccgactgggtagacctggtgtcctggagccacccaggacccacgtctaagtcccagcaggttgacctggtgtctttatttcctaaacaccgggttgacctgttatccaaaaacgaccaggtagacctggtggctcaatttttaccatctaaatttccccccaatttggcagaaaatgatttggctttgctggtgaacttagagttctacagatcggatttgcatgtgtatgagggcgttcataaggctgcacattgggagggattaagtggtttgcctgaggtgtatgaacaacttgcaccacaaccgtgtgtgggagaaactttacattctagcctcccacgagacagtgaactgtttgtgcctgaagaggggagcagcgagaaggagagcgaggacgcgccaaaaacatctcctccgacgcctgggaaacatggtaagaggcagactggggaggaaaaagtgatggtgactgttcctgacaaaaatccaccttgtccttgctgtggtacccgggtaaactctgtgttgaatctgattgaacatctgaaagtgtcacacgggaaaaggagggtttgttttcggtgtgcaaaatgtggaaaggaaaatagtaactatcacagtgttgtttgtcattttaagaaatgcaggggtccagagacggagaaagccccagctggggagtggatttgtgaggtatgcaacagagattttacaaccaaaattggcctgggacaacacaagagaagggcacacccagcagtgagaaatcaggaaaggatcgttgcttcccaaccgaaagaaacatcaaatagaggtgctcacaaaaggtgctggacaaaggaggaggaagaattactaataagactggaggctcagttcgagggaaacaaaaatattaataagcttattgcagaacacataaccaccaaaacagctaagcagatcagtgacaaaaggcgattgctgtccagaaagccagcagaggagccacgtgagatgcctggaacgtgtcatcacaccaggagagcagctgcgagcctgagaacggagcctgagatgagtcatcacgcccaggcagaggacagagataatggacctgggagacgccctctgccaggcagggcagctgccggagggagaacaatggacgagataagacgccaccctgataagggcaacggacagcagagacccaccaagcaaaaatcagaagaacagctgcaggcttactataaaaagacactagaggaacgactttcagctggggcacttaacaccttcccccgagcattcaagcaggtaatggaaggccgggatataaagctagtaatcaatcagacagcgcaggactacttcggatgcctggaatccataagccaaataagaacggcaacccgagataaaaagtacacggtgacccggaagaaacacccaaagaaaccttttcagaagtggatgaagaagagagcaatcaaaaaaggtaattatcttcggttccagcgtttattttatcttgatagagggaaactggctaaaatcattttagatgatattgaatgcttgtcttgtgacataccactcagtgaaatttattcggtttttaaaacaagatgggaaacaactggtagctttaaaagccttggggactttaaaacttacgggaaggctgacaacactgccttcagagacttaattacggctaaagaaattgagaaaaatgtgcaggaaatgagcaaaggctcggctcccggtccagacgggattactcttggggacgtcgtaaagatggatcccgagggctcccggaccatggagattttcaatttatggttaacaactggtaaaatcccggacatggtgagggggtgcagaaccgttttgattccaaaatcatcagacccggatcgtttgaaagacattaataactggagacctatcacgatcggttccatcttgctgagactgttctccaggattgtaacagctaggctgagcaaagcgtgccccctgaacccaaggcaaagaggctttatcagagcggcgggatgctctgaaaacttaaaactcctgcaaactataatttggtcggccaaaagagaacacagaccactgggtgttgtattcgtggacatcgccaaggcttttgacaccgtaagccaccagcacatcattcatgctttgcagcaaagagaggtggatccccacatcgtcggtctggtgagcaatatgtacgagaacatcagtacgtatatcaccacaaagaggaacacacacacagacaaaatccagatccgggttggagtaaagcagggtgacccgatgtcgccccttttatttaacctggcaatggaccctctattatgcaagctggaagagagtggcaaaggataccaccgaggacagagcagcatcacagcgatggcatttgcagacgatctggttttgctgagcgactcctgggaaggcatgaatacaaatattagcatactggagaccttctgcaatctgaccggactcaaaacacaggggcaaaagtgccacggcttttacatcaagccgacaaagaagtcttacaccatcaatgactgcgctgcctggactatcaacggcacacccctgaacatgatcgaccccggcgaatctgagaaatacctcggcctgcagtttgacccgtggattggaatagcaaggtccggtctctccacaaaactagatttttggcttcagcggatcgatcaagcaccacttaaacctctgcagaaactggatattctcaaaacatacaccatccctcggctgatctacatagctgaccactcagaagtgaaaactgcactactcgaaacccttgaccagaagatccggacagcggtcaaggaatggcttcacctacctccgtgcacctgcgatgccatcctgtactcgagcacgagagacggcggtttgggcatcaccaaattggcaggactgatccccagcgtgcaggcccgtagactgcatcggatcgcacagtcatctgacgatacgatgaaatgcttcatggaaaaagagaaaatggaacagctgcataagaaattgtggattcaagctggaggggacagagagaacataccctcgatttgggaagcaccaccgtcgagtgaaccaccaaacaacgtgagcacaaattcggaatgggaagcaccgacccagaaagataaatttccaaagccttgcaattggaggaaaaacgaattcaaaaaatggaccaaattggcatcccaaggccgcggaattgtaaattttgaaagagacaaaattagtaaccattggatccaatactacagacgcatacctcacaggaaactcctcactgcactacaactcagggccaacgtttaccccacgagagaatttctagccaggggtagacaagaccaatacatcaaggcgtgtaggcactgcgatgcggacattgaatcctgcgcccacatcatcggcaactgcccagtgacacaggacgcccgaatcaagaggcacaataagatctgcgaactgcttctcgaggaggcgaagaagaaggactgggtagtgttcaaggaaccgcacataagggattccaacaaggaactgtacaaacctgacctgatatttgtgaaggatggccgtgcacttgtcgtggatgtgacagtacggtatgaagcagccaaatcatcgctggaggaagccgctgcagagaaagtgagaaagtacaaacacctggaaacggaagtaagacatctcacgaatgcaaaggacgttacttttgtgggctttcccctaggagcgcgggggaaatggcaccaagataactttaaacttttgactgagcttggcctctccaaatcgaggcaagtgaaaatggcagagactttttccacagtagcgctcttttcatctgtggacattgtacatatgtttgccagtagggccagaaaatctatggttatgtgataataggctgccttctgcggggcttgccttctggccatgcccttcttctctcccttgcacctgtacctcttggtctttgaataaagcctgagtaggaaggaccggtaaaaaaaaaaaaaaaaaaaaaaaaaaaaaaacgttgactaaaaaaaaaaaaaaaaaaaaaaaaaaaaaaaaaaaaaaaaaaaaaaaaaaaaaaaaaaaaaaaaaaaaaa

SEQ ID NO: 11824 - DNA, 4564 bp, synthetic construct
  source 1..4564: mol_type = other DNA
ggtctagttacaactgggcatcgctgcagagatcgcacctcctcgtggtcccgctggtagcccttcgaagggtgactaagtcgatctctgccccaggtacggagccgttgggactcaccagtccaacgtaactcctgcctaaattcggtgaaacaaattcctcggtaaaaagccccatggcttcttgcccgaaacctggccccccggtttcagcaggggcaatgagtttggaaagtggactgaccacccactccgttctcgccatcgaacgtggtcccaattcgttggcaaattccggatcagactttgggggggggggtctggggctaccgttacgcctattgagggtatcggtcggcactcagacctcccgctccgactgggtagacctggtgtcctggagccacccaggacccacgtctaagtcccagcaggttgacctggtgtctttatttcctaaacaccgggttgacctgttatccaaaaacgaccaggtagacctggtggctcaatttttaccatctaaatttccccccaatttggcagaaaatgatttggctttgctggtgaacttagagttctacagatcggatttgcatgtgtatgagtgtgttcataaggctgcacattgggagggattaagtggtttgcctgaggtgtatgaacaacttgcaccacaaccgtgtgtgggagaaactttacattctagcctcccacgagacagtgaactgtttgtgcctgaagaggggagcagcgagaaggagagcgaggacgcgccaaaaacatctcctccgacgcctgggaaacatggtttggaacagactggggaggaaaaagtgatggtgactgttcctgacaaaaatccaccttgtccttgctgtggtacccgggtaaactctgtgttgaatctgattgaacatctgaaagtgtcacacgggaaaaggagggtttgttttcggtgtgcaaaatgtggaaaggaaaatagtaactatcacagtgttgtttgtcattttccaaaatgcaggggtccagagacggagaaagccccagctggggagtggatttgtgaggtatgcaacagagattttacaaccaaaattggcctgggacaacacaagagattggcacacccagcagtgagaaatcaggaaaggatcgttgcttcccaaccgaaagaaacatcaaatagaggtgctcacaaaaggtgctggacaaaggaggaggaagaattactaataagactggaggctcagttcgagggacacaaaaatattaataagcttattgcagaacacataaccaccaaaacagctaagcagatcagtgacaaaaggcgattgctgtccagaaagccagcagaggagccacgtatggagcctggaacgtgtcatcacaccaggagagcagctgcgagcctgagaacggagcctgagatgagtcatcaggcccaggcagaggacagagataatggacctgggagacgccctctgccaggcaggcccgctgccggagggagaacaatggacgagataagacgccaccctgataagggcaacggacagcagagacccaccaagcaaaaatcagaagaacagctgcaggcttactataaaaagacactagaggaacgactttcagctggggcacttaacaccttcccccgagcattcaagcaggtaatggaaggccgggatataaagctagtaatcaatcagacagcgcaggactgcttcggatgcctggaatccataagccaaataagaacggcaacccgagataaaaagtacacgggcacccgggagaaacacccaaagaggccttttcagaagtggatgaagaagagagcaatcaaaaaaggtaattatcttcggttccagcgtttattttatcttgatagagggaaactggctaaaatcattttagatgatattgaatgcttgtcttgtgacataccactcagtgaaatttattcggtttttaaaacaagatgggaaacaactggtagctttaaaagccttggggactttaaaacttacgggaaggctgacaacactgccttcagagaattaattacggctaaagaaattgagaaaaatgtgcaggaaatgagcaaaggctcggctcccggtccagacgggattactcttggggacgtcgtaaagatggatcccgagttttccctgaccatggagattttcaatttatggttaacaactggtaaaatcccggacatggtgagggggtgcagaaccgttttgattccaaaatcatcaaagccggatcgtttgaaagacattaataactggagacctatcacgatcggttccatcttgctgagactgttctccaggattgtaacagctaggctgagcaaagcgtgccccctgaacccaaggcaaagaggctttatcagagcggcgggatgctctgaaaacttaaaactcctgcaaactataatttggtcggccaaaagagaacacagaccactgggtgttgtattcgtggacatcgccaaggcttttgacaccgtaagccaccagcacatcattcatgctttgcagcaaagagaggtggatccccacatcgtcggtctggtgagcaatatgtacgagaacatcagtacgtatatcaccacaaagaggaacacacacacagacaaaatccagatccgggttggagtaaagcagggtgacccgatgtcgccccttttatttaacctggcaatggaccctctattatgcaagctggaagagagtggcaaaggataccaccgaggacagagcagcatcacagcgatggcatttgcagacgatctggttttgctgagcgactcctgggaaaatatgaatacaaatattagcatactggagaccttctgcaatctgaccggactcaaaacacaggggcaaaagtgccacggcttttacatcaagccgacaaaggactcttacaccatcaatgactgcgctgcctggactatcaacggcacacccctgaacatgatcgaccccggcgaatctgagaaatacctcggcctgcagtttgacccgtggattggaatagcaaggtccggtctctccacaaaactagatgagtggcttcagcggatcgatcaagcaccacttaaacctctgcagaaaactgatattctcaaaacatacaccatccctcggctgatctacatagctgaccactcagaagtgaaagccgcactactcgaaacccttgaccagaagatccggacagcggtcaaggaatggcttcacctacctccgtgcacctgcgatgccatcctgtactcgagcacgagagacggcggtttgggcatcaccaaattggcaggactgatccccagcgtgcaggcccgtagactgcatcggatcgcacagtcatctgacgatacgatgaaatgcttcatggaaaaagagaggatggaacagctgcataagaaattgtggattcaagctggaggggacagagagaacataccctcgatttgggaagcaccaccgtcgagtgaaccaccaaacaacgtgagcacaaattcggaatgggaagcaccgacccagaaacccaaatttccaaagccttgcaattggaggaaaaacgaattcaaaaaatggaccaaattggcatcccaaggccgcggaattgtaaattttgaaagagacaaaattagtaaccattggatccaatactacagaggcatacctcacaggaaactcctcactgcactacaactcagggccaacgtttaccccacgagagaatttctagccaggggtagacaagaccaatacatcaaggcgtgtaggcactgcgatgcggacattgaatcctgcgcccacatcatcggcaactgcccagtgacacaggacgcccgaatcaagaggcacaattacatctgcgaactgcttctcgaggaggcgaagaagaaggactgggtagtgttcaaggaaccgcacataagggattccaacaaggaactgtacaaacctgacctgatatttgtgaaggatggccgtgcacttgtcgtggatgtgacagtacggtatgaagcagccaaatcatcgctggaggaagccgctgcagagaaagtgagaaagtacaaacacctggaaacggaagtaagacatctcacgaatgcaaaggacgttacttttgtgggctttcccctaggagcgcgggggaaatggcaccaagataactttaaacttttgactgagcttggcctctccaaatcgaggcaagtgaaaatggcagagactttttccacagtagcgctcttttcatctgtggacattgtacatatgtttgccagtagggccagaaaatctatggttatgtgataataggctgccttctgcggggcttgccttctggccatgcccttcttctctcccttgcacctgtacctcttggtctttgaataaagcctgagtaggaaggaccggtaaaaaaaaaaaaaaaaaaaaaaaaaaaaaaacgttgactaaaaaaaaaaaaaaaaaaaaaaaaaaaaaaaaaaaaaaaaaaaaaaaaaaaaaaaaaaaaaaaaaaaaaa

SEQ ID NO: 11825 - DNA, 4564 bp, synthetic construct
  source 1..4564: mol_type = other DNA
ggtctagttacaactgggcatcgctgcagagatcgcacctcctcgtggtcccgctggtagcccttcgaagggtgactaagtcgatctctgccccaggtacggagccgttgggactcaccagtccaacgtaactcctgcctaaattcggtgaaacaaattcctcggtaaaaagccccatggcttcttgcccgaaacctggccccccggtttcagcaggggcaatgagtttggaaagtggactgaccacccactccgttctcgccatcgaacgtggtcccaattcgttggcaaattccggatcagactttgggggggggggtctggggctaccgttacgcctattgagggtatcggtcggcactcagacctcccgctccgactgggtagacctggtgtcctggagccacccaggacccacgtctaagtcccagcaggttgacctggtgtctttatttcctaaacaccgggttgacctgttatccaaaaacgaccaggtagacctggtggctcaatttttaccatctaaatttccccccaatttggcagaaaatgatttggctttgctggtgaacttagagttctacagatcggatttgcatgtgtatgagtgtgttcataaggctgcacattgggagggattaagtggtttgcctgaggtgtatgaacaacttgcaccacaaccgtgtgtgggagaaactttacattctagcctcccacgagacagtgaactgtttgtgcctgaagaggggagcagcgagaaggagagcgaggacgcgccaaaaacatctcctccgacgcctgggaaacatggtttggaacagactggggaggaaaaagtgatggtgactgttcctgacaaaaatccaccttgtccttgctgtggtacccgggtaaactctgtgttgaatctgattgaacatctgaaagtgtcacacgggaaaaggagggtttgttttcggtgtgcaaaatgtggaaaggaaaatagtaactatcacagtgttgtttgtcattttaagaaatgcaggggtccagagacggagaaagccccagctggggagtggatttgtgaggtatgcaacagagattttacaaccaaaattggcctgggacaacacaagagattggcacacccagcagtgagaaatcaggaaaggatcgttgcttcccaaccgaaagaaacatcaaatagaggtgctcacaaaaggtgctggacaaaggaggaggaagaattactaataagactggaggctcagttcgagggacacaaaaatattaataagcttattgcagaacacataaccaccaaaacagctaagcagatcagtgacaaaaggcgattgctgtccagaaagccagcagaggagccacgtatggagcctggaacgtgtcatcacaccaggagagcagctgcgagcctgagaacggagcctgagatgagtcatcaggcccaggcagaggacagagataatggacctgggagacgccctctgccaggcaggcccgctgccggagggagaacaatggacgagataagacgccaccctgataagggcaacggacagcagagacccaccaagcaaaaatcagaagaacagctgcaggcttactataaaaagacactagaggaacgactttcagctggggcacttaacaccttcccccgagcattcaagcaggtaatggaaggccgggatataaagctagtaatcaatcagacagcgcaggactgcttcggatgcctggaatccataagccaaataagaacggcaacccgagataaaaagtacacgggcacccgggagaaacacccaaagaggccttttcagaagtggatgaagaagagagcaatcaaaaaaggtaattatcttcggttccagcgtttattttatcttgatagagggaaactggctaaaatcattttagatgatattgaatgcttgtcttgtgacataccactcagtgaaatttattcggtttttaaaacaagatgggaaacaactggtagctttaaaagccttggggactttaaaacttacgggaaggctgacaacactgccttcagagaattaattacggctaaagaaattgagaaaaatgtgcaggaaatgagcaaaggctcggctcccggtccagacgggattactcttggggacgtcgtaaagatggatcccgagttttccctgaccatggagattttcaatttatggttaacaactggtaaaatcccggacatggtgagggggtgcagaaccgttttgattccaaaatcatcaaagccggatcgtttgaaagacattaataactggagacctatcacgatcggttccatcttgctgagactgttctccaggattgtaacagctaggctgagcaaagcgtgccccctgaacccaaggcaaagaggctttatcagagcggcgggatgctctgaaaacttaaaactcctgcaaactataatttggtcggccaaaagagaacacagaccactgggtgttgtattcgtggacatcgccaaggcttttgacaccgtaagccaccagcacatcattcatgctttgcagcaaagagaggtggatccccacatcgtcggtctggtgagcaatatgtacgagaacatcagtacgtatatcaccacaaagaggaacacacacacagacaaaatccagatccgggttggagtaaagcagggtgacccgatgtcgccccttttatttaacctggcaatggaccctctattatgcaagctggaagagagtggcaaaggataccaccgaggacagagcagcatcacagcgatggcatttgcagacgatctggttttgctgagcgactcctgggaaaatatgaatacaaatattagcatactggagaccttctgcaatctgaccggactcaaaacacaggggcaaaagtgccacggcttttacatcaagccgacaaaggactcttacaccatcaatgactgcgctgcctggactatcaacggcacacccctgaacatgatcgaccccggcgaatctgagaaatacctcggcctgcagtttgacccgtggattggaatagcaaggtccggtctctccacaaaactagatgagtggcttcagcggatcgatcaagcaccacttaaacctctgcagaaaactgatattctcaaaacatacaccatccctcggctgatctacatagctgaccactcagaagtgaaagccgcactactcgaaacccttgaccagaagatccggacagcggtcaaggaatggcttcacctacctccgtgcacctgcgatgccatcctgtactcgagcacgagagacggcggtttgggcatcaccaaattggcaggactgatccccagcgtgcaggcccgtagactgcatcggatcgcacagtcatctgacgatacgatgaaatgcttcatggaaaaagagaggatggaacagctgcataagaaattgtggattcaagctggaggggacagagagaacataccctcgatttgggaagcaccaccgtcgagtgaaccaccaaacaacgtgagcacaaattcggaatgggaagcaccgacccagaaacccaaatttccaaagccttgcaattggaggaaaaacgaattcaaaaaatggaccaaattggcatcccaaggccgcggaattgtaaattttgaaagagacaaaattagtaaccattggatccaatactacagaggcatacctcacaggaaactcctcactgcactacaactcagggccaacgtttaccccacgagagaatttctagccaggggtagacaagaccaatacatcaaggcgtgtaggcactgcgatgcggacattgaatcctgcgcccacatcatcggcaactgcccagtgacacaggacgcccgaatcaagaggcacaattacatctgcgaactgcttctcgaggaggcgaagaagaaggactgggtagtgttcaaggaaccgcacataagggattccaacaaggaactgtacaaacctgacctgatatttgtgaaggatggccgtgcacttgtcgtggatgtgacagtacggtatgaagcagccaaatcatcgctggaggaagccgctgcagagaaagtgagaaagtacaaacacctggaaacggaagtaagacatctcacgaatgcaaaggacgttacttttgtgggctttcccctaggagcgcgggggaaatggcaccaagataactttaaacttttgactgagcttggcctctccaaatcgaggcaagtgaaaatggcagagactttttccacagtagcgctcttttcatctgtggacattgtacatatgtttgccagtagggccagaaaatctatggttatgtgataataggctgccttctgcggggcttgccttctggccatgcccttcttctctcccttgcacctgtacctcttggtctttgaataaagcctgagtaggaaggaccggtaaaaaaaaaaaaaaaaaaaaaaaaaaaaaaacgttgactaaaaaaaaaaaaaaaaaaaaaaaaaaaaaaaaaaaaaaaaaaaaaaaaaaaaaaaaaaaaaaaaaaaaaa

SEQ ID NO: 11826 - DNA, 5407 bp, synthetic construct
  source 1..5407: mol_type = other DNA
ggtctagttacaactgggcatcgctgcagagatcgcacctcctcgtggtcccgctggtagcccttcgaagggtgactaagtcgatctctgccccaggtacggagccgttgggactcaccagtccaacgtaactcctgcctaaattcggtgaaacaaattcctcggtaaaaagccccatgggaactgcactaacaccgctcctgacgaagttcgccacgcgctacgagatgggtaccacgcctgaagaagtggcgaacacgctcaagcagacctgtttcaagggccaggtcaatgattcgcagatggtcgccctgctgatcgtggcagaccagtacaagcttaaccccttcaccaaggagttgtacgcattccccgacaagaacaacggcatcgtgccggttgttggtgtggatggctgggctcggatcatcaacgagaacccacagttcgatggcatggaattctcaatggaccagcagggaaccgaatgcacctgcaagatctatcggaaggaccgcagccatgccatcagcgcgactgagtacatggccgagtgcaagcggaacacccagccttggcagtcccatccgcgccggatgcttcgccacaaggcaatgatccagtgcgcacgcctcgcgttcgggttcgccggcatatacgaccaggacgaggccgagcggatcgttgaacgagacgtcactcccgcagagcagtacgaggacgtcagcgaggcgatctgcctgatcaaggactccccaacaatggaggacttgcaggcagcattcagcaatgcctggaaagcctataagacaaagggcgcgcgcgaccagcttacggcggccaaggaccagcggaagaaagaattgctggacgcccctatagacgttgaattcgaggagaccggcgatgatcgagcagcgtctggaggatctagcggaggatcctctggcagcgagacaccaggaacaagcgagtcagcaacaccagagagcagtggcggcagcagcggcggcagcagcatggcttcttgcccgaaacctggccccccggtttcagcaggggcaatgagtttggaaagtggactgaccacccactccgttctcgccatcgaacgtggtcccaattcgttggcaaattccggatcagactttgggggggggggtctggggctaccgttacgcctattgagggtatcggtcggcactcagacctcccgctccgactgggtagacctggtgtcctggagccacccaggacccacgtctaagtcccagcaggttgacctggtgtctttatttcctaaacaccgggttgacctgttatccaaaaacgaccaggtagacctggtggctcaatttttaccatctaaatttccccccaatttggcagaaaatgatttggctttgctggtgaacttagagttctacagatcggatttgcatgtgtatgagtgtgttcataaggctgcacattgggagggattaagtggtttgcctgaggtgtatgaacaacttgcaccacaaccgtgtgtgggagaaactttacattctagcctcccacgagacagtgaactgtttgtgcctgaagaggggagcagcgagaaggagagcgaggacgcgccaaaaacatctcctccgacgcctgggaaacatggtttggaacagactggggaggaaaaagtgatggtgactgttcctgacaaaaatccaccttgtccttgctgtggtacccgggtaaactctgtgttgaatctgattgaacatctgaaagtgtcacacgggaaaaggagggtttgttttcggtgtgcaaaatgtggaaaggaaaatagtaactatcacagtgttgtttgtcattttaagaaatgcaggggtccagagacggagaaagccccagctggggagtggatttgtgaggtatgcaacagagattttacaaccaaaattggcctgggacaacacaagagattggcacacccagcagtgagaaatcaggaaaggatcgttgcttcccaaccgaaagaaacatcaaatagaggtgctcacaaaaggtgctggacaaaggaggaggaagaattactaataagactggaggctcagttcgagggacacaaaaatattaataagcttattgcagaacacataaccaccaaaacagctaagcagatcagtgacaaaaggcgattgctgtccagaaagccagcagaggagccacgtatggagcctggaacgtgtcatcacaccaggagagcagctgcgagcctgagaacggagcctgagatgagtcatcacgcccaggcagaggacagagataatggacctgggagacgccctctgccaggcaggcccgctgccggagggagaacaatggacgagataagacgccaccctgataagggcaacggacagcagagacccaccaagcaaaaatcagaagaacagctgcaggcttactataaaaagacactagaggaacgactttcagctggggcacttaacaccttcccccgagcattcaagcaggtaatggaaggccgggatataaagctagtaatcaatcagacagcgcaggactgcttcggatgcctggaatccataagccaaataagaacggcaacccgagataaaaagtacacggtgacccgggagaaacacccaaagaggccttttcagaagtggatgaagaagagagcaatcaaaaaaggtaattatcttcggttccagcgtttattttatcttgatagagggaaactggctaaaatcattttagatgatattgaatgcttgtcttgtgacataccactcagtgaaatttattcggtttttaaaacaagatgggaaacaactggtagctttaaaagccttggggactttaaaacttacgggaaggctgacaacactgccttcagagaattaattacggctaaagaaattgagaaaaatgtgcaggaaatgagcaaaggctcggctcccggtccagacgggattactcttggggacgtcgtaaagatggatcccgagttttccctgaccatggagattttcaatttatggttaacaactggtaaaatcccggacatggtgagggggtgcagaaccgttttgattccaaaatcatcaaagccggatcgtttgaaagacattaataactggagacctatcacgatcggttccatcttgctgagactgttctccaggattgtaacagctaggctgagcaaagcgtgccccctgaacccaaggcaaagaggctttatcagagcggcgggatgctctgaaaacttaaaactcctgcaaactataatttggtcggccaaaagagaacacagaccactgggtgttgtattcgtggacatcgccaaggcttttgacaccgtaagccaccagcacatcattcatgctttgcagcaaagagaggtggatccccacatcgtcggtctggtgagcaatatgtacgagaacatcagtacgtatatcaccacaaagaggaacacacacacagacaaaatccagatccgggttggagtaaagcagggtgacccgatgtcgccccttttatttaacctggcaatggaccctctattatgcaagctggaagagagtggcaaaggataccaccgaggacagagcagcatcacagcgatggcatttgcagacgatctggttttgctgagcgactcctgggaaaatatgaatacaaatattagcatactggagaccttctgcaatctgaccggactcaaaacacaggggcaaaagtgccacggcttttacatcaagccgacaaaggactcttacaccatcaatgactgcgctgcctggactatcaacggcacacccctgaacatgatcgaccccggcgaatctgagaaatacctcggcctgcagtttgacccgtggattggaatagcaaggtccggtctctccacaaaactagatgagtggcttcagcggatcgatcaagcaccacttaaacctctgcagaaaactgatattctcaaaacatacaccatccctcggctgatctacatagctgaccactcagaagtgaaagccgcactactcgaaacccttgaccagaagatccggacagcggtcaaggaatggcttcacctacctccgtgcacctgcgatgccatcctgtactcgagcacgagagacggcggtttgggcatcaccaaattggcaggactgatccccagcgtgcaggcccgtagactgcatcggatcgcacagtcatctgacgatacgatgaaatgcttcatggaaaaagagaggatggaacagctgcataagaaattgtggattcaagctggaggggacagagagaacataccctcgatttgggaagcaccaccgtcgagtgaaccaccaaacaacgtgagcacaaattcggaatgggaagcaccgacccagaaacccaaatttccaaagccttgcaattggaggaaaaacgaattcaaaaaatggaccaaattggcatcccaaggccgcggaattgtaaattttgaaagagacaaaattagtaaccattggatccaatactacagacgcatacctcacaggaaactcctcactgcactacaactcagggccaacgtttaccccacgagagaatttctagccaggggtagacaagaccaatacatcaaggcgtgtaggcactgcgatgcggacattgaatcctgcgcccacatcatcggcaactgcccagtgacacaggacgcccgaatcaagaggcacaattacatctgcgaactgcttctcgaggaggcgaagaagaaggactgggtagtgttcaaggaaccgcacataagggattccaacaaggaactgtacaaacctgacctgatatttgtgaaggatggccgtgcacttgtcgtggatgtgacagtacggtatgaagcagccaaatcatcgctggaggaagccgctgcagagaaagtgagaaagtacaaacacctggaaacggaagtaagacatctcacgaatgcaaaggacgttacttttgtgggctttcccctaggagcgcgggggaaatggcaccaagataactttaaacttttgactgagcttggcctctccaaatcgaggcaagtgaaaatggcagagactttttccacagtagcgctcttttcatctgtggacattgtacatatgtttgccagtagggccagaaaatctatggttatgtgataataggctgccttctgcggggcttgccttctggccatgcccttcttctctcccttgcacctgtacctcttggtctttgaataaagcctgagtaggaaggaccggtaaaaaaaaaaaaaaaaaaaaaaaaaaaaaaacgttgactaaaaaaaaaaaaaaaaaaaaaaaaaaaaaaaaaaaaaaaaaaaaaaaaaaaaaaaaaaaaaaaaaaaaaa

SEQ ID NO: 11827 - DNA, 4439 bp, synthetic construct
  source 1..4439: mol_type = other DNA
gaaataagagagaaaagaagagtaagaagaaatataagagaattcgccaccatggcttcttgcccgaaacctggccccccggtttcagcaggggcaatgagtttggaaagtggactgaccacccactccgttctcgccatcgaacgtggtcccaattcgttggcaaattccggatcagactttgggggggggggtctggggctaccgttacgcctattgagggtatcggtcggcactcagacctcccgctccgactgggtagacctggtgtcctggagccacccaggacccacgtctaagtcccagcaggttgacctggtgtctttatttcctaaacaccgggttgacctgttatccaaaaacgaccaggtagacctggtggctcaatttttaccatctaaatttccccccaatttggcagaaaatgatttggctttgctggtgaacttagagttctacagatcggatttgcatgtgtatgagtgtgttcataaggctgcacattgggagggattaagtggtttgcctgaggtgtatgaacaacttgcaccacaaccgtgtgtgggagaaactttacattctagcctcccacgagacagtgaactgtttgtgcctgaagaggggagcagcgagaaggagagcgaggacgcgccaaaaacatctcctccgacgcctgggaaacatggtttggaacagactggggaggaaaaagtgatggtgactgttcctgacaaaaatccaccttgtccttgctgtggtacccgggtaaactctgtgttgaatctgattgaacatctgaaagtgtcacacgggaaaaggagggtttgttttcggtgtgcaaaatgtggaaaggaaaatagtaactatcacagtgttgtttgtcattttaagaaatgcaggggtccagagacggagaaagccccagctggggagtggatttgtgaggtatgcaacagagattttacaaccaaaattggcctgggacaacacaagagattggcacacccagcagtgagaaatcaggaaaggatcgttgcttcccaaccgaaagaaacatcaaatagaggtgctcacaaaaggtgctggacaaaggaggaggaagaattactaataagactggaggctcagttcgagggaaacaaaaatattaataagcttattgcagaacacataaccaccaaaacagctaagcagatcagtgacaaaaggcgattgctgtccagaaagccagcagaggagccacgtgaggagcctggaacgtgtcatcacaccaggagagcagctgcgagcctgagaacggagcctgagatgagtcatcacgcccaggcagaggacagagataatggacctgggagacgccctctgccaggcagggcagctgccggagggagaacaatggacgagataagacgccaccctgataagggcaacggacagcagagacccaccaagcaaaaatcagaagaacagctgcaggcttactataaaaagacactagaggaacgactttcagctggggcacttaacaccttcccccgagcattcaagcaggtaatggaaggccgggatataaagctagtaatcaatcagacagcgcaggactgcttcggatgcctggaatccataagccaaataagaacggcaacccgagataaaaaggacacggtgacccgggagaaacacccaaagaaaccttttcagaagtggatgaagaagagagcaatcaaaaaaggtaattatcttcggttccagcgtttattttatcttgatagagggaaactggctaaaatcattttagatgatattgaatgcttgtcttgtgacataccactcagtgaaatttattcggtttttaaaacaagatgggaaacaactggtagctttaaaagccttggggactttaaaacttacgggaaggctgacaacactgccttcagagaattaattacggctaaagaaattgagaaaaatgtgcaggaaatgagcaaaggctcggctcccggtccagacgggattactcttggggacgtcgtaaagatggatcccgagttttcccggaccatggagattttcaatttatggttaacaactggtaaaatcccggacatggtgagggggtgcagaaccgttttgattccaaaatcatcaaagccggatcgtttgaaagacattaataactggagacctatcacgatcggttccatcttgctgagactgttctccaggattgtaacagctaggctgagcaaagcgtgccccctgaacccaaggcaaagaggctttatcagagcggcgggatgctctgaaaacttaaaactcctgcaaactataatttggtcggccaaaagagaacacagaccactgggtgttgtattcgtggacatcgccaaggcttttgacaccgtaagccaccagcacatcattcatgctttgcagcaaagagaggtggatccccacatcgtcggtctggtgagcaatatgtacgagaacatcagtacgtatatcaccacaaagaggaacacacacacagacaaaatccagatccgggttggagtaaagcagggtgacccgatgtcgccccttttatttaacctggcaatggaccctctattatgcaagctggaagagagtggcaaaggataccaccgaggacagagcagcatcacagcgatggcatttgcagacgatctggttttgctgagcgactcctgggaaaatatgaatacaaatattagcatactggagaccttctgcaatctgaccggactcaaaacacaggggcaaaagtgccacggcttttacatcaagccgacaaaggactcttacaccatcaatgactgcgctgcctggactatcaacggcacacccctgaacatgatcgaccccggcgaatctgagaaatacctcggcctgcagtttgacccgtggattggaatagcaaggtccggtctctccacaaaactagatttttggcttcagcggatcgatcaagcaccacttaaacctctgcagaaaactgatattctcaaaacatacaccatccctcggctgatctacatagctgaccactcagaagtgaaaagcgcactactcgaaacccttgaccagaagatccggacagcggtcaaggaatggcttcacctacctccgtgcacctgcgatgccatcctgtactcgagcacgagagacggcggtttgggcatcaccaaattggcaggactgatccccagcgtgcaggcccgtagactgcatcggatcgcacagtcatctgacgatacgatgaaatgcttcatggaaaaagagaaaatggaacagctgcataagaaattgtggattcaagctggaggggacagagagaacataccctcgatttgggaagcaccaccgtcgagtgaaccaccaaacaacgtgagcacaaattcggaatgggaagcaccgacccagaaagataaatttccaaagccttgcaattggaggaaaaacgaattcaaaaaatggaccaaattggcatcccaaggccgcggaattgtaaattttgaaagagacaaaattagtaaccattggatccaatactacagacgcatacctcacaggaaactcctcactgcactacaactcagggccaacgtttaccccacgagagaatttctagccaggggtagacaagaccaatacatcaaggcgtgtaggcactgcgatgcggacaacgaatcctgcgcccacatcatcggcaactgcccagtgacacaggacgcccgaatcaagaggcacaattacatctgcgaactgcttctcgaggaggcgaagaagaaggactgggtagtgttcaaggaaccgcacataagggattccaacaaggaactgtacaaacctgacctgatatttgtgaaggatgggcgtgcacttgtcgtggatgtgacagtacggtatgaagcagccaaatcatcgctggaggaagccgctgcagagaaagtgagaaagtacaaacacctggaaacggaagtaagacatctcacgaatgcaaaggacgttacttttgtgggctttcccctaggagcgcgggggaaatggcaccaagataactttaaacttttgactgagcttggcctctccaaatcgaggcaagtgaaaatggcagagactttttccacagtagcgctcttttcatctgtggacattgtacatatgtttgccagtagggccagaaaatctatggttatgtgataataggctgccttctgcggggcttgccttctggccatgcccttcttctctcccttgcacctgtacctcttggtctttgaataaagcctgagtaggaaggaccggtaaaaaaaaaaaaaaaaaaaaaaaaaaaaaaacgttgactaaaaaaaaaaaaaaaaaaaaaaaaaaaaaaaaaaaaaaaaaaaaaaaaaaaaaaaaaaaaaaaaaaaaaa

SEQ ID NO: 11828 - DNA, 5144 bp, synthetic construct
  source 1..5144: mol_type = other DNA
gaaataagagagaaaagaagagtaagaagaaatataagagaattcgccaccatggcccctaagaaaaagcggaaggtgaatatcagcggctctagctgcggcagccccaacagcgccgacaccagcagcgacttcaaggacctgtggaccaagctgaaggaatgccacgaccgggaagtgcagggactccaggtgaaggtcaccaaactcaagcaagaaagaatcctggacgcccagagactggaagaattcttcaccaagaaccagcagctgagagagcagcagaaagtgctgcacgagacaatcaaggttctggaagatagactgcgggccggcctgtgcgacagatgcgccgtgaccgaggaacacatgcgcaaaaagcagcaggagttcgagaacattagacagcaaaatctgaaattgatcacagagctgatgaacgagagaaacacactgcaggaggagaacaagaagctgagcgagcagctgcaacagaagatcgagaatgatcagcaacaccaggccgctgagctggaatgtgaagaggacgtgatccccgacagcccaatcacagctttcagcttttctggcgtgaacagactgaggcggaaggaaaacccccacgtgcggtacatcgagcagacccataccaagctggaacacagcgtgtgtgccaacgagatgagaaaggtgtccaagtcctccacccatccccagcacaaccctaacgaaaatgagatcctggtggctgatacctacgaccagtctcagagccctatggccaaggcccacggcaccagctcttatacccctgataagagctccttcaacctggccaccgtggtggccgagacactgggcctgggcgtgcaggaggaaagcgagacacagggcccaatgagccctctgggagatgagctgtaccactgcctggaaggcaaccacaagaaacagccttttgagtccggctccgagactcctggaacaagcgagagcgctacacctgagggcagcgtgaccgtgaagttcaagtacaagggcgaggaaaaggaagtggacatcagcaagatcaagaaggtctggcgggtgggcaagatgatcagctttacctacgacgataacggcaagacaggcagaggcgccgtgtccgagaaggacgcccctaaagagctgctgcagatgctggaaaaaagcggctctgagacacctggaacaagcgagagcgccaccccggaatcctatgaacaacttgcaccacaaccgtgtgtgggagaaactttacattctagcctcccacgagacagtgaactgtttgtgcctgaagaggggagcagcgagaaggagagcgaggacgcgccaaaaacatctcctccgacgcctgggaaacatggtttggaacagactggggaggaaaaagtgatggtgactgttcctgacaaaaatccaccttgtccttgctgtggtacccgggtaaactctgtgttgaatctgattgaacatctgaaagtgtcacacgggaaaaggggggtttgttttcggtgtgcaaaatgtggaaaggaaaatagtaactatcacagtgttgtttgtcattttaagaaatgcaggggtccagagacggagaaagccccagctggggagtggatttgtgaggtatgcaacagagattttacaaccaaaattggcctgggacaacacaagagattggcacacccagcagtgagaaatcaggaaaggatcgttgcttcccaaccgaaagaaacatcaaatagaggtgctcacaaaaggtgctggacaaaggaggaggaagaattactaataagactggaggctcagttcgagggaaacaaaaatattaataagcttattgcagaacacataaccaccaaaacagctaagcagatcagtgacaaaaggcgattgctgtccagaaagccagcagaggagccacgtgaggagcctggaacgtgtcatcacaccaggagagcagctgcgagcctgagaacggagcctgagatgagtcatcacgcccaggcagaggacagagataatggacctgggagacgccctctgccaggcagggcagctgccggagggagaacaatggacgagataagacgccaccctgataagggcaacggacagcagagacccaccaagcaaaaatcagaagaacagctgcaggcttactataaaaagacactagaggaacgactttcagctggggcacttaacaccttcccccgagcattcaagcaggtaatggaaggccgggatataaagctagtaatcaatcagacagcgcaggactacttcggatgcctggaatccataagccaaataagaacggcaacccgagataaaaaggacacggtgacccgggagaaacacccaaagaaaccttttcagaagtggatgaagaagagagcaatcaaaaaaggtaattatcttcggttccagcgtttattttatcttgatagagggaaactggctaaaatcattttagatgatattgaatgcttgtcttgtgacataccactcagtgaaatttattcggtttttaaaacaagatgggaaacaactggtagctttaaaagccttggggactttaaaacttacgggaaggctgacaacactgccttcagagaattaattacggctaaagaaattgagaaaaatgtgcaggaaatgagcaaaggctcggctcccggtccagacgggattactcttggggacgtcgtaaagatggatcccgagttttcccggaccatggagattttcaatttatggttaacaactggtaaaatcccggacatggtgagggggtgcagaaccgttttgattccaaaatcatcagacccggatcgtttgaaagacattaataactggagacctatcacgatcggttccatcttgctgagactgttctccaggattgtaacagctaggctgagcaaagcgtgccccctgaacccaaggcaaagaggctttatcagagcggcgggatgctctgaaaacttaaaactcctgcaaactataatttggtcggccaaaagagaacacagaccactgggtgttgtattcgtggacatcgccaaggcttttgacaccgtaagccaccagcacatcattcatgctttgcagcaaagagaggtggatccccacatcgtcggtctggtgagcaatatgtacgagaacatcagtacgtatatcaccacaaagaggaacacacacacagacaaaatccagatccgggttggagtaaagcagggtgacccgatgtcgccccttttatttaacctggcaatggaccctctattatgcaagctggaagagagtggcaaaggataccaccgaggacagagcagcatcacagcgatggcatttgcagacgatctggttttgctgagcgactcctgggaaaatatgaatacaaatattagcatactggagaccttctgcaatctgaccggactcaaaacacaggggcaaaagtgccacggcttttacatcaagccgacaaaggactcttacaccatcaatgactgcgctgcctggactatcaacggcacacccctgaacatgatcgaccccggcgaatctgagaaatacctcggcctgcagtttgacccgtggattggaatagcaaggtccggtctctccacaaaactagatttttggcttcagcggatcgatcaagcaccacttaaacctctgcagaaaactgatattctcaaaacatacaccatccctcggctgatctacatagctgaccactcagaagtgaaaagcgcactactcgaaacccttgaccagaagatccggacagcggtcaaggaatggcttcacctacctccgtgcacctgcgatgccatcctgtactcgagcacgagagacggcggtttgggcatcaccaaattggcaggactgatccccagcgtgcaggcccgtagactgcatcggatcgcacagtcatctgacgatacgatgaaatgcttcatggaaaaagagaaaatggaacagctgcataagaaattgtggattcaagctggaggggacagagagaacataccctcgatttgggaagcaccaccgtcgagtgaaccaccaaacaacgtgagcacaaattcggaatgggaagcaccgacccagaaagataaatttccaaagccttgcaattggaggaaaaacgaattcaaaaaatggaccaaattggcatcccaaggccgcggaattgtaaattttgaaagagacaaaattagtaaccattggatccaatactacagacgcatacctcacaggaaactcctcactgcactacaactcagggccaacgtttaccccacgagagaatttctagccaggggtagacaagaccaatacatcaaggcgtgtaggcactgcgatgcggacaacgaatcctgcgcccacatcatcggcaactgcccagtgacacaggacgcccgaatcaagaggcacaattacatctgcgaactgcttctcgaggaggcgaagaagaaggactgggtagtgttcaaggaaccgcacataagggattccaacaaggaactgtacaaacctgacctgatatttgtgaaggatgggcgtgcacttgtcgtggatgtgacagtacggtatgaagcagccaaatcatcgctggaggaagccgctgcagagaaagtgagaaagtacaaacacctggaaacggaagtaagacatctcacgaatgcaaaggacgttacttttgtgggctttcccctaggagcgcgggggaaatggcaccaagataactttaaacttttgactgagcttggcctctccaaatcgaggcaagtgaaaatggcagagactttttccacagtagcgctcttttcatctgtggacattgtacatatgtttgccagtagggccagaaaatctatggttatgtgataataggctgccttctgcggggcttgccttctggccatgcccttcttctctcccttgcacctgtacctcttggtctttgaataaagcctgagtaggaaggaccggtaaaaaaaaaaaaaaaaaaaaaaaaaaaaaaacgttgactaaaaaaaaaaaaaaaaaaaaaaaaaaaaaaaaaaaaaaaaaaaaaaaaaaaaaaaaaaaaaaaaaaaaaa

SEQ ID NO: 11829 - DNA, 5144 bp, synthetic construct
  source 1..5144: mol_type = other DNA
gaaataagagagaaaagaagagtaagaagaaatataagagaattcgccaccatggcccctaagaaaaagcggaaggtgaatatcagcggctctagctgcggcagccccaacagcgccgacaccagcagcgacttcaaggacctgtggaccaagctgaaggaatgccacgaccgggaagtgcagggactccaggtgaaggtcaccaaactcaagcaagaaagaatcctggacgcccagagactggaagaattcttcaccaagaaccagcagctgagagagcagcagaaagtgctgcacgagacaatcaaggttctggaagatagactgcgggccggcctgtgcgacagatgcgccgtgaccgaggaacacatgcgcaaaaagcagcaggagttcgagaacattagacagcaaaatctgaaattgatcacagagctgatgaacgagagaaacacactgcaggaggagaacaagaagctgagcgagcagctgcaacagaagatcgagaatgatcagcaacaccaggccgctgagctggaatgtgaagaggacgtgatccccgacagcccaatcacagctttcagcttttctggcgtgaacagactgaggcggaaggaaaacccccacgtgcggtacatcgagcagacccataccaagctggaacacagcgtgtgtgccaacgagatgagaaaggtgtccaagtcctccacccatccccagcacaaccctaacgaaaatgagatcctggtggctgatacctacgaccagtctcagagccctatggccaaggcccacggcaccagctcttatacccctgataagagctccttcaacctggccaccgtggtggccgagacactgggcctgggcgtgcaggaggaaagcgagacacagggcccaatgagccctctgggagatgagctgtaccactgcctggaaggcaaccacaagaaacagccttttgagtccggctccgagactcctggaacaagcgagagcgctacacctgagggcagcgtgaccgtgaagttcaagtacaagggcgaggaaaaggaagtggacatcagcaagatcaagaaggtctggcgggtgggcaagatgatcagctttacctacgacgataacggcaagacaggcagaggcgccgtgtccgagaaggacgcccctaaagagctgctgcagatgctggaaaaaagcggctctgagacacctggaacaagcgagagcgccaccccggaatcctatgaacaacttgcaccacaaccgtgtgtgggagaaactttacattctagcctcccacgagacagtgaactgtttgtgcctgaagaggggagcagcgagaaggagagcgaggacgcgccaaaaacatctcctccgacgcctgggaaacatggtttggaacagactggggaggaaaaagtgatggtgactgttcctgacaaaaatccaccttgtccttgctgtggtacccgggtaaactctgtgttgaatctgattgaacatctgaaagtgtcacacgggaaaaggggggtttgttttcggtgtgcaaaatgtggaaaggaaaatagtaactatcacagtgttgtttgtcattttaagaaatgcaggggtccagagacggagaaagccccagctggggagtggatttgtgaggtatgcaacagagattttacaaccaaaattggcctgggacaacacaagagattggcacacccagcagtgagaaatcaggaaaggatcgttgcttcccaaccgaaagaaacatcaaatagaggtgctcacaaaaggtgctggacaaaggaggaggaagaattactaataagactggaggctcagttcgagggaaacaaaaatattaataagcttattgcagaacacataaccaccaaaacagctaagcagatcagtgacaaaaggcgattgctgtccagaaagccagcagaggagccacgtgaggagcctggaacgtgtcatcacaccaggagagcagctgcgagcctgagaacggagcctgagatgagtcatcacgcccaggcagaggacagagataatggacctgggagacgccctctgccaggcagggcagctgccggagggagaacaatggacgagataagacgccaccctgataagggcaacggacagcagagacccaccaagcaaaaatcagaagaacagctgcaggcttactataaaaagacactagaggaacgactttcagctggggcacttaacaccttcccccgagcattcaagcaggtaatggaaggccgggatataaagctagtaatcaatcagacagcgcaggactacttcggatgcctggaatccataagccaaataagaacggcaacccgagataaaaaggacacggtgacccgggagaaacacccaaagaaaccttttcagaagtggatgaagaagagagcaatcaaaaaaggtaattatcttcggttccagcgtttattttatcttgatagagggaaactggctaaaatcattttagatgatattgaatgcttgtcttgtgacataccactcagtgaaatttattcggtttttaaaacaagatgggaaacaactggtagctttaaaagccttggggactttaaaacttacgggaaggctgacaacactgccttcagagaattaattacggctaaagaaattgagaaaaatgtgcaggaaatgagcaaaggctcggctcccggtccagacgggattactcttggggacgtcgtaaagatggatcccgagttttcccggaccatggagattttcaatttatggttaacaactggtaaaatcccggacatggtgagggggtgcagaaccgttttgattccaaaatcatcagacccggatcgtttgaaagacattaataactggagacctatcacgatcggttccatcttgctgagactgttctccaggattgtaacagctaggctgagcaaagcgtgccccctgaacccaaggcaaagaggctttatcagagcggcgggatgctctgaaaacttaaaactcctgcaaactataatttggtcggccaaaagagaacacagaccactgggtgttgtattcgtggacatcgccaaggcttttgacaccgtaagccaccagcacatcattcatgctttgcagcaaagagaggtggatccccacatcgtcggtctggtgagcaatatgtacgagaacatcagtacgtatatcaccacaaagaggaacacacacacagacaaaatccagatccgggttggagtaaagcagggtgacccgatgtcgccccttttatttaacctggcaatggaccctctattatgcaagctggaagagagtggcaaaggataccaccgaggacagagcagcatcacagcgatggcatttgcagacgatctggttttgctgagcgactcctgggaaaatatgaatacaaatattagcatactggagaccttctgcaatctgaccggactcaaaacacaggggcaaaagtgccacggcttttacatcaagccgacaaaggactcttacaccatcaatgactgcgctgcctggactatcaacggcacacccctgaacatgatcgaccccggcgaatctgagaaatacctcggcctgcagtttgacccgtggattggaatagcaaggtccggtctctccacaaaactagatttttggcttcagcggatcgatcaagcaccacttaaacctctgcagaaactggatattctcaaaacatacaccatccctcggctgatctacatagctgaccactcagaagtgaaaagcgcactactcgaaacccttgaccagaagatccggacagcggtcaaggaatggcttcacctacctccgtgcacctgcgatgccatcctgtactcgagcacgagagacggcggtttgggcatcaccaaattggcaggactgatccccagcgtgcaggcccgtagactgcatcggatcgcacagtcatctgacgatacgatgaaatgcttcatggaaaaagagaaaatggaacagctgcataagaaattgtggattcaagctggaggggacagagagaacataccctcgatttgggaagcaccaccgtcgagtgaaccaccaaacaacgtgagcacaaattcggaatgggaagcaccgacccagaaagataaatttccaaagccttgcaattggaggaaaaacgaattcaaaaaatggaccaaattggcatcccaaggccgcggaattgtaaattttgaaagagacaaaattagtaaccattggatccaatactacagacgcatacctcacaggaaactcctcactgcactacaactcagggccaacgtttaccccacgagagaatttctagccaggggtagacaagaccaatacatcaaggcgtgtaggcactgcgatgcggacaacgaatcctgcgcccacatcatcggcaactgcccagtgacacaggacgcccgaatcaagaggcacaattacatctgcgaactgcttctcgaggaggcgaagaagaaggactgggtagtgttcaaggaaccgcacataagggattccaacaaggaactgtacaaacctgacctgatatttgtgaaggatgggcgtgcacttgtcgtggatgtgacagtacggtatgaagcagccaaatcatcgctggaggaagccgctgcagagaaagtgagaaagtacaaacacctggaaacggaagtaagacatctcacgaatgcaaaggacgttacttttgtgggctttcccctaggagcgcgggggaaatggcaccaagataactttaaacttttgactgagcttggcctctccaaatcgaggcaagtgaaaatggcagagactttttccacagtagcgctcttttcatctgtggacattgtacatatgtttgccagtagggccagaaaatctatggttatgtgataataggctgccttctgcggggcttgccttctggccatgcccttcttctctcccttgcacctgtacctcttggtctttgaataaagcctgagtaggaaggaccggtaaaaaaaaaaaaaaaaaaaaaaaaaaaaaaacgttgactaaaaaaaaaaaaaaaaaaaaaaaaaaaaaaaaaaaaaaaaaaaaaaaaaaaaaaaaaaaaaaaaaaaaaa

SEQ ID NO: 11830 - DNA, 5645 bp, synthetic construct
  source 1..5645: mol_type = other DNA
gaaataagagagaaaagaagagtaagaagaaatataagagaattcgccaccatggcccctaagaaaaagcggaaggtgaccgatccacgagaaacggttccgcccggcaactccggcgaggagactatcggtgaggccttcgcctggctcaaccgcaccgtggaggccatcaatagggaggctgtcaaccacttgccccgcgagctgatctttcaggtctggcagcgttcttggcgttattggcatgacgagcagggaatgtcggagagctacaccaagtaccgctacctgtgcatcatccagaaggccgtgtacatgcacgtgcgcaaagggtgcacttgcctgggccgcggccacggccctggcggctggcggcccgggccgcctcccccgccaccccctggtctggtgagcggctctgagacacctggaacaagcgagagcgccaccccggaatccaatatcagcggctctagctgcggcagccccaacagcgccgacaccagcagcgacttcaaggacctgtggaccaagctgaaggaatgccacgaccgggaagtgcagggactccaggtgaaggtcaccaaactcaagcaagaaagaatcctggacgcccagagactggaagaattcttcaccaagaaccagcagctgagagagcagcagaaagtgctgcacgagacaatcaaggttctggaagatagactgcgggccggcctgtgcgacagatgcgccgtgaccgaggaacacatgcgcaaaaagcagcaggagttcgagaacattagacagcaaaatctgaaattgatcacagagctgatgaacgagagaaacacactgcaggaggagaacaagaagctgagcgagcagctgcaacagaagatcgagaatgatcagcaacaccaggccgctgagctggaatgtgaagaggacgtgatccccgacagcccaatcacagctttcagcttttctggcgtgaacagactgaggcggaaggaaaacccccacgtgcggtacatcgagcagacccataccaagctggaacacagcgtgtgtgccaacgagatgagaaaggtgtccaagtcctccacccatccccagcacaaccctaacgaaaatgagatcctggtggctgatacctacgaccagtctcagagccctatggccaaggcccacggcaccagctcttatacccctgataagagctccttcaacctggccaccgtggtggccgagacactgggcctgggcgtgcaggaggaaagcgagacacagggcccaatgagccctctgggagatgagctgtaccactgcctggaaggcaaccacaagaaacagccttttgagtccggctccgagactcctggaacaagcgagagcgctacacctgagggcagccctaagagaaaggtgtccagcgccgagggcgctgccaaggaagagcctaaacggagaagcgccagactgagcgccaagccccccgccaaggtggaagccaagcctaagaaggccgccgctaaggacaagagcagcgataagaaagtccagaccaagggcaagcggggcgccaaaggcaaacaggccgaggtggccaaccaggagacaaaggaagatctgcctgctgagaacggcgaaaccaagaccgaggaatctccagcttctgacgaggccggagagaaggaggccaaaagcgacagcggctctgagacacctggaacaagcgagagcgccaccccggaatcctatgaacaacttgcaccacaaccgtgtgtgggagaaactttacattctagcctcccacgagacagtgaactgtttgtgcctgaagaggggagcagcgagaaggagagcgaggacgcgccaaaaacatctcctccgacgcctgggaaacatggtttggaacagactggggaggaaaaagtgatggtgactgttcctgacaaaaatccaccttgtccttgctgtggtacccgggtaaactctgtgttgaatctgattgaacatctgaaagtgtcacacgggaaaaggggggtttgttttcggtgtgcaaaatgtggaaaggaaaatagtaactatcacagtgttgtttgtcattttaagaaatgcaggggtccagagacggagaaagccccagctggggagtggatttgtgaggtatgcaacagagattttacaaccaaaattggcctgggacaacacaagagattggcacacccagcagtgagaaatcaggaaaggatcgttgcttcccaaccgaaagaaacatcaaatagaggtgctcacaaaaggtgctggacaaaggaggaggaagaattactaataagactggaggctcagttcgagggaaacaaaaatattaataagcttattgcagaacacataaccaccaaaacagctaagcagatcagtgacaaaaggcgattgctgtccagaaagccagcagaggagccacgtgaggagcctggaacgtgtcatcacaccaggagagcagctgcgagcctgagaacggagcctgagatgagtcatcacgcccaggcagaggacagagataatggacctgggagacgccctctgccaggcagggcagctgccggagggagaacaatggacgagataagacgccaccctgataagggcaacggacagcagagacccaccaagcaaaaatcagaagaacagctgcaggcttactataaaaagacactagaggaacgactttcagctggggcacttaacaccttcccccgagcattcaagcaggtaatggaaggccgggatataaagctagtaatcaatcagacagcgcaggactgcttcggatgcctggaatccataagccaaataagaacggcaacccgagataaaaaggacacggtgacccgggagaaacacccaaagaaaccttttcagaagtggatgaagaagagagcaatcaaaaaaggtaattatcttcggttccagcgtttattttatcttgatagagggaaactggctaaaatcattttagatgatattgaatgcttgtcttgtgacataccactcagtgaaatttattcggtttttaaaacaagatgggaaacaactggtagctttaaaagccttggggactttaaaacttacgggaaggctgacaacactgccttcagagaattaattacggctaaagaaattgagaaaaatgtgcaggaaatgagcaaaggctcggctcccggtccagacgggattactcttggggacgtcgtaaagatggatcccgagttttcccggaccatggagattttcaatttatggttaacaactggtaaaatcccggacatggtgagggggtgcagaaccgttttgattccaaaatcatcaaagccggatcgtttgaaagacattaataactggagacctatcacgatcggttccatcttgctgagactgttctccaggattgtaacagctaggctgagcaaagcgtgccccctgaacccaaggcaaagaggctttatcagagcggcgggatgctctgaaaacttaaaactcctgcaaactataatttggtcggccaaaagagaacacagaccactgggtgttgtattcgtggacatcgccaaggcttttgacaccgtaagccaccagcacatcattcatgctttgcagcaaagagaggtggatccccacatcgtcggtctggtgagcaatatgtacgagaacatcagtacgtatatcaccacaaagaggaacacacacacagacaaaatccagatccgggttggagtaaagcagggtgacccgatgtcgccccttttatttaacctggcaatggaccctctattatgcaagctggaagagagtggcaaaggataccaccgaggacagagcagcatcacagcgatggcatttgcagacgatctggttttgctgagcgactcctgggaaaatatgaatacaaatattagcatactggagaccttctgcaatctgaccggactcaaaacacaggggcaaaagtgccacggcttttacatcaagccgacaaaggactcttacaccatcaatgactgcgctgcctggactatcaacggcacacccctgaacatgatcgaccccggcgaatctgagaaatacctcggcctgcagtttgacccgtggattggaatagcaaggtccggtctctccacaaaactagatttttggcttcagcggatcgatcaagcaccacttaaacctctgcagaaaactgatattctcaaaacatacaccatccctcggctgatctacatagctgaccactcagaagtgaaaagcgcactactcgaaacccttgaccagaagatccggacagcggtcaaggaatggcttcacctacctccgtgcacctgcgatgccatcctgtactcgagcacgagagacggcggtttgggcatcaccaaattggcaggactgatccccagcgtgcaggcccgtagactgcatcggatcgcacagtcatctgacgatacgatgaaatgcttcatggaaaaagagaaaatggaacagctgcataagaaattgtggattcaagctggaggggacagagagaacataccctcgatttgggaagcaccaccgtcgagtgaaccaccaaacaacgtgagcacaaattcggaatgggaagcaccgacccagaaagataaatttccaaagccttgcaattggaggaaaaacgaattcaaaaaatggaccaaattggcatcccaaggccgcggaattgtaaattttgaaagagacaaaattagtaaccattggatccaatactacagacgcatacctcacaggaaactcctcactgcactacaactcagggccaacgtttaccccacgagagaatttctagccaggggtagacaagaccaatacatcaaggcgtgtaggcactgcgatgcggacaacgaatcctgcgcccacatcatcggcaactgcccagtgacacaggacgcccgaatcaagaggcacaattacatctgcgaactgcttctcgaggaggcgaagaagaaggactgggtagtgttcaaggaaccgcacataagggattccaacaaggaactgtacaaacctgacctgatatttgtgaaggatgggcgtgcacttgtcgtggatgtgacagtacggtatgaagcagccaaatcatcgctggaggaagccgctgcagagaaagtgagaaagtacaaacacctggaaacggaagtaagacatctcacgaatgcaaaggacgttacttttgtgggctttcccctaggagcgcgggggaaatggcaccaagataactttaaacttttgactgagcttggcctctccaaatcgaggcaagtgaaaatggcagagactttttccacagtagcgctcttttcatctgtggacattgtacatatgtttgccagtagggccagaaaatctatggttatgtgataataggctgccttctgcggggcttgccttctggccatgcccttcttctctcccttgcacctgtacctcttggtctttgaataaagcctgagtaggaaggaccggtaaaaaaaaaaaaaaaaaaaaaaaaaaaaaaacgttgactaaaaaaaaaaaaaaaaaaaaaaaaaaaaaaaaaaaaaaaaaaaaaaaaaaaaaaaaaaaaaaaaaaaaaa

SEQ ID NO: 11831 - DNA, 5351 bp, synthetic construct
  source 1..5351: mol_type = other DNA
gaaataagagagaaaagaagagtaagaagaaatataagagaattcgccaccatggcccctaagaaaaagcggaaggtggctacccgcatcggccgtttcgccaactacctgcgcaacagcggctctgagacacctggaacaagcgagagcgccaccccggaatccaatatcagcggctctagctgcggcagccccaacagcgccgacaccagcagcgacttcaaggacctgtggaccaagctgaaggaatgccacgaccgggaagtgcagggactccaggtgaaggtcaccaaactcaagcaagaaagaatcctggacgcccagagactggaagaattcttcaccaagaaccagcagctgagagagcagcagaaagtgctgcacgagacaatcaaggttctggaagatagactgcgggccggcctgtgcgacagatgcgccgtgaccgaggaacacatgcgcaaaaagcagcaggagttcgagaacattagacagcaaaatctgaaattgatcacagagctgatgaacgagagaaacacactgcaggaggagaacaagaagctgagcgagcagctgcaacagaagatcgagaatgatcagcaacaccaggccgctgagctggaatgtgaagaggacgtgatccccgacagcccaatcacagctttcagcttttctggcgtgaacagactgaggcggaaggaaaacccccacgtgcggtacatcgagcagacccataccaagctggaacacagcgtgtgtgccaacgagatgagaaaggtgtccaagtcctccacccatccccagcacaaccctaacgaaaatgagatcctggtggctgatacctacgaccagtctcagagccctatggccaaggcccacggcaccagctcttatacccctgataagagctccttcaacctggccaccgtggtggccgagacactgggcctgggcgtgcaggaggaaagcgagacacagggcccaatgagccctctgggagatgagctgtaccactgcctggaaggcaaccacaagaaacagccttttgagtccggctccgagactcctggaacaagcgagagcgctacacctgagggcagccctaagagaaaggtgtccagcgccgagggcgctgccaaggaagagcctaaacggagaagcgccagactgagcgccaagccccccgccaaggtggaagccaagcctaagaaggccgccgctaaggacaagagcagcgataagaaagtccagaccaagggcaagcggggcgccaaaggcaaacaggccgaggtggccaaccaggagacaaaggaagatctgcctgctgagaacggcgaaaccaagaccgaggaatctccagcttctgacgaggccggagagaaggaggccaaaagcgacagcggctctgagacacctggaacaagcgagagcgccaccccggaatcctatgaacaacttgcaccacaaccgtgtgtgggagaaactttacattctagcctcccacgagacagtgaactgtttgtgcctgaagaggggagcagcgagaaggagagcgaggacgcgccaaaaacatctcctccgacgcctgggaaacatggtttggaacagactggggaggaaaaagtgatggtgactgttcctgacaaaaatccaccttgtccttgctgtggtacccgggtaaactctgtgttgaatctgattgaacatctgaaagtgtcacacgggaaaaggggggtttgttttcggtgtgcaaaatgtggaaaggaaaatagtaactatcacagtgttgtttgtcattttaagaaatgcaggggtccagagacggagaaagccccagctggggagtggatttgtgaggtatgcaacagagattttacaaccaaaattggcctgggacaacacaagagattggcacacccagcagtgagaaatcaggaaaggatcgttgcttcccaaccgaaagaaacatcaaatagaggtgctcacaaaaggtgctggacaaaggaggaggaagaattactaataagactggaggctcagttcgagggaaacaaaaatattaataagcttattgcagaacacataaccaccaaaacagctaagcagatcagtgacaaaaggcgattgctgtccagaaagccagcagaggagccacgtgaggagcctggaacgtgtcatcacaccaggagagcagctgcgagcctgagaacggagcctgagatgagtcatcacgcccaggcagaggacagagataatggacctgggagacgccctctgccaggcagggcagctgccggagggagaacaatggacgagataagacgccaccctgataagggcaacggacagcagagacccaccaagcaaaaatcagaagaacagctgcaggcttactataaaaagacactagaggaacgactttcagctggggcacttaacaccttcccccgagcattcaagcaggtaatggaaggccgggatataaagctagtaatcaatcagacagcgcaggactgcttcggatgcctggaatccataagccaaataagaacggcaacccgagataaaaaggacacggtgacccgggagaaacacccaaagaaaccttttcagaagtggatgaagaagagagcaatcaaaaaaggtaattatcttcggttccagcgtttattttatcttgatagagggaaactggctaaaatcattttagatgatattgaatgcttgtcttgtgacataccactcagtgaaatttattcggtttttaaaacaagatgggaaacaactggtagctttaaaagccttggggactttaaaacttacgggaaggctgacaacactgccttcagagaattaattacggctaaagaaattgagaaaaatgtgcaggaaatgagcaaaggctcggctcccggtccagacgggattactcttggggacgtcgtaaagatggatcccgagttttcccggaccatggagattttcaatttatggttaacaactggtaaaatcccggacatggtgagggggtgcagaaccgttttgattccaaaatcatcaaagccggatcgtttgaaagacattaataactggagacctatcacgatcggttccatcttgctgagactgttctccaggattgtaacagctaggctgagcaaagcgtgccccctgaacccaaggcaaagaggctttatcagagcggcgggatgctctgaaaacttaaaactcctgcaaactataatttggtcggccaaaagagaacacagaccactgggtgttgtattcgtggacatcgccaaggcttttgacaccgtaagccaccagcacatcattcatgctttgcagcaaagagaggtggatccccacatcgtcggtctggtgagcaatatgtacgagaacatcagtacgtatatcaccacaaagaggaacacacacacagacaaaatccagatccgggttggagtaaagcagggtgacccgatgtcgccccttttatttaacctggcaatggaccctctattatgcaagctggaagagagtggcaaaggataccaccgaggacagagcagcatcacagcgatggcatttgcagacgatctggttttgctgagcgactcctgggaaaatatgaatacaaatattagcatactggagaccttctgcaatctgaccggactcaaaacacaggggcaaaagtgccacggcttttacatcaagccgacaaaggactcttacaccatcaatgactgcgctgcctggactatcaacggcacacccctgaacatgatcgaccccggcgaatctgagaaatacctcggcctgcagtttgacccgtggattggaatagcaaggtccggtctctccacaaaactagatttttggcttcagcggatcgatcaagcaccacttaaacctctgcagaaaactgatattctcaaaacatacaccatccctcggctgatctacatagctgaccactcagaagtgaaaagcgcactactcgaaacccttgaccagaagatccggacagcggtcaaggaatggcttcacctacctccgtgcacctgcgatgccatcctgtactcgagcacgagagacggcggtttgggcatcaccaaattggcaggactgatccccagcgtgcaggcccgtagactgcatcggatcgcacagtcatctgacgatacgatgaaatgcttcatggaaaaagagaaaatggaacagctgcataagaaattgtggattcaagctggaggggacagagagaacataccctcgatttgggaagcaccaccgtcgagtgaaccaccaaacaacgtgagcacaaattcggaatgggaagcaccgacccagaaagataaatttccaaagccttgcaattggaggaaaaacgaattcaaaaaatggaccaaattggcatcccaaggccgcggaattgtaaattttgaaagagacaaaattagtaaccattggatccaatactacagacgcatacctcacaggaaactcctcactgcactacaactcagggccaacgtttaccccacgagagaatttctagccaggggtagacaagaccaatacatcaaggcgtgtaggcactgcgatgcggacaacgaatcctgcgcccacatcatcggcaactgcccagtgacacaggacgcccgaatcaagaggcacaattacatctgcgaactgcttctcgaggaggcgaagaagaaggactgggtagtgttcaaggaaccgcacataagggattccaacaaggaactgtacaaacctgacctgatatttgtgaaggatgggcgtgcacttgtcgtggatgtgacagtacggtatgaagcagccaaatcatcgctggaggaagccgctgcagagaaagtgagaaagtacaaacacctggaaacggaagtaagacatctcacgaatgcaaaggacgttacttttgtgggctttcccctaggagcgcgggggaaatggcaccaagataactttaaacttttgactgagcttggcctctccaaatcgaggcaagtgaaaatggcagagactttttccacagtagcgctcttttcatctgtggacattgtacatatgtttgccagtagggccagaaaatctatggttatgtgataataggctgccttctgcggggcttgccttctggccatgcccttcttctctcccttgcacctgtacctcttggtctttgaataaagcctgagtaggaaggaccggtaaaaaaaaaaaaaaaaaaaaaaaaaaaaaaacgttgactaaaaaaaaaaaaaaaaaaaaaaaaaaaaaaaaaaaaaaaaaaaaaaaaaaaaaaaaaaaaaaaaaaaaaa

SEQ ID NO: 11832 - DNA, 5573 bp, synthetic construct
  source 1..5573: mol_type = other DNA
gaaataagagagaaaagaagagtaagaagaaatataagagaattcgccaccatggcccctaagaaaaagcggaaggtggccgcttctctgaacggcgcccctctgattaaggaccctatgctgatcttcgtgaaaacactgaccggcaagaccatcacactggaggtggaacctagcgacaccatcgagaatgtgaaggccaagatccaggacaaggaaggcatcccccccgaccagcagagactggccttcgccggaaaaagcctggaggacggcagaaccctgtccgattacaacatcctgaaggacagcaagctgcacccactgctgcggctgagaagcggctctgagacacctggaacaagcgagagcgccaccccggaatccaatatcagcggctctagctgcggcagccccaacagcgccgacaccagcagcgacttcaaggacctgtggaccaagctgaaggaatgccacgaccgggaagtgcagggactccaggtgaaggtcaccaaactcaagcaagaaagaatcctggacgcccagagactggaagaattcttcaccaagaaccagcagctgagagagcagcagaaagtgctgcacgagacaatcaaggttctggaagatagactgcgggccggcctgtgcgacagatgcgccgtgaccgaggaacacatgcgcaaaaagcagcaggagttcgagaacattagacagcaaaatctgaaattgatcacagagctgatgaacgagagaaacacactgcaggaggagaacaagaagctgagcgagcagctgcaacagaagatcgagaatgatcagcaacaccaggccgctgagctggaatgtgaagaggacgtgatccccgacagcccaatcacagctttcagcttttctggcgtgaacagactgaggcggaaggaaaacccccacgtgcggtacatcgagcagacccataccaagctggaacacagcgtgtgtgccaacgagatgagaaaggtgtccaagtcctccacccatccccagcacaaccctaacgaaaatgagatcctggtggctgatacctacgaccagtctcagagccctatggccaaggcccacggcaccagctcttatacccctgataagagctccttcaacctggccaccgtggtggccgagacactgggcctgggcgtgcaggaggaaagcgagacacagggcccaatgagccctctgggagatgagctgtaccactgcctggaaggcaaccacaagaaacagccttttgagtccggctccgagactcctggaacaagcgagagcgctacacctgagggcagccctaagagaaaggtgtccagcgccgagggcgctgccaaggaagagcctaaacggagaagcgccagactgagcgccaagccccccgccaaggtggaagccaagcctaagaaggccgccgctaaggacaagagcagcgataagaaagtccagaccaagggcaagcggggcgccaaaggcaaacaggccgaggtggccaaccaggagacaaaggaagatctgcctgctgagaacggcgaaaccaagaccgaggaatctccagcttctgacgaggccggagagaaggaggccaaaagcgacagcggctctgagacacctggaacaagcgagagcgccaccccggaatcctatgaacaacttgcaccacaaccgtgtgtgggagaaactttacattctagcctcccacgagacagtgaactgtttgtgcctgaagaggggagcagcgagaaggagagcgaggacgcgccaaaaacatctcctccgacgcctgggaaacatggtttggaacagactggggaggaaaaagtgatggtgactgttcctgacaaaaatccaccttgtccttgctgtggtacccgggtaaactctgtgttgaatctgattgaacatctgaaagtgtcacacgggaaaaggggggtttgttttcggtgtgcaaaatgtggaaaggaaaatagtaactatcacagtgttgtttgtcattttaagaaatgcaggggtccagagacggagaaagccccagctggggagtggatttgtgaggtatgcaacagagattttacaaccaaaattggcctgggacaacacaagagattggcacacccagcagtgagaaatcaggaaaggatcgttgcttcccaaccgaaagaaacatcaaatagaggtgctcacaaaaggtgctggacaaaggaggaggaagaattactaataagactggaggctcagttcgagggaaacaaaaatattaataagcttattgcagaacacataaccaccaaaacagctaagcagatcagtgacaaaaggcgattgctgtccagaaagccagcagaggagccacgtgaggagcctggaacgtgtcatcacaccaggagagcagctgcgagcctgagaacggagcctgagatgagtcatcacgcccaggcagaggacagagataatggacctgggagacgccctctgccaggcagggcagctgccggagggagaacaatggacgagataagacgccaccctgataagggcaacggacagcagagacccaccaagcaaaaatcagaagaacagctgcaggcttactataaaaagacactagaggaacgactttcagctggggcacttaacaccttcccccgagcattcaagcaggtaatggaaggccgggatataaagctagtaatcaatcagacagcgcaggactgcttcggatgcctggaatccataagccaaataagaacggcaacccgagataaaaaggacacggtgacccgggagaaacacccaaagaaaccttttcagaagtggatgaagaagagagcaatcaaaaaaggtaattatcttcggttccagcgtttattttatcttgatagagggaaactggctaaaatcattttagatgatattgaatgcttgtcttgtgacataccactcagtgaaatttattcggtttttaaaacaagatgggaaacaactggtagctttaaaagccttggggactttaaaacttacgggaaggctgacaacactgccttcagagaattaattacggctaaagaaattgagaaaaatgtgcaggaaatgagcaaaggctcggctcccggtccagacgggattactcttggggacgtcgtaaagatggatcccgagttttcccggaccatggagattttcaatttatggttaacaactggtaaaatcccggacatggtgagggggtgcagaaccgttttgattccaaaatcatcaaagccggatcgtttgaaagacattaataactggagacctatcacgatcggttccatcttgctgagactgttctccaggattgtaacagctaggctgagcaaagcgtgccccctgaacccaaggcaaagaggctttatcagagcggcgggatgctctgaaaacttaaaactcctgcaaactataatttggtcggccaaaagagaacacagaccactgggtgttgtattcgtggacatcgccaaggcttttgacaccgtaagccaccagcacatcattcatgctttgcagcaaagagaggtggatccccacatcgtcggtctggtgagcaatatgtacgagaacatcagtacgtatatcaccacaaagaggaacacacacacagacaaaatccagatccgggttggagtaaagcagggtgacccgatgtcgccccttttatttaacctggcaatggaccctctattatgcaagctggaagagagtggcaaaggataccaccgaggacagagcagcatcacagcgatggcatttgcagacgatctggttttgctgagcgactcctgggaaaatatgaatacaaatattagcatactggagaccttctgcaatctgaccggactcaaaacacaggggcaaaagtgccacggcttttacatcaagccgacaaaggactcttacaccatcaatgactgcgctgcctggactatcaacggcacacccctgaacatgatcgaccccggcgaatctgagaaatacctcggcctgcagtttgacccgtggattggaatagcaaggtccggtctctccacaaaactagatttttggcttcagcggatcgatcaagcaccacttaaacctctgcagaaaactgatattctcaaaacatacaccatccctcggctgatctacatagctgaccactcagaagtgaaaagcgcactactcgaaacccttgaccagaagatccggacagcggtcaaggaatggcttcacctacctccgtgcacctgcgatgccatcctgtactcgagcacgagagacggcggtttgggcatcaccaaattggcaggactgatccccagcgtgcaggcccgtagactgcatcggatcgcacagtcatctgacgatacgatgaaatgcttcatggaaaaagagaaaatggaacagctgcataagaaattgtggattcaagctggaggggacagagagaacataccctcgatttgggaagcaccaccgtcgagtgaaccaccaaacaacgtgagcacaaattcggaatgggaagcaccgacccagaaagataaatttccaaagccttgcaattggaggaaaaacgaattcaaaaaatggaccaaattggcatcccaaggccgcggaattgtaaattttgaaagagacaaaattagtaaccattggatccaatactacagacgcatacctcacaggaaactcctcactgcactacaactcagggccaacgtttaccccacgagagaatttctagccaggggtagacaagaccaatacatcaaggcgtgtaggcactgcgatgcggacaacgaatcctgcgcccacatcatcggcaactgcccagtgacacaggacgcccgaatcaagaggcacaattacatctgcgaactgcttctcgaggaggcgaagaagaaggactgggtagtgttcaaggaaccgcacataagggattccaacaaggaactgtacaaacctgacctgatatttgtgaaggatgggcgtgcacttgtcgtggatgtgacagtacggtatgaagcagccaaatcatcgctggaggaagccgctgcagagaaagtgagaaagtacaaacacctggaaacggaagtaagacatctcacgaatgcaaaggacgttacttttgtgggctttcccctaggagcgcgggggaaatggcaccaagataactttaaacttttgactgagcttggcctctccaaatcgaggcaagtgaaaatggcagagactttttccacagtagcgctcttttcatctgtggacattgtacatatgtttgccagtagggccagaaaatctatggttatgtgataataggctgccttctgcggggcttgccttctggccatgcccttcttctctcccttgcacctgtacctcttggtctttgaataaagcctgagtaggaaggaccggtaaaaaaaaaaaaaaaaaaaaaaaaaaaaaaacgttgactaaaaaaaaaaaaaaaaaaaaaaaaaaaaaaaaaaaaaaaaaaaaaaaaaaaaaaaaaaaaaaaaaaaaaa

SEQ ID NO: 11833 - DNA, 5711 bp, synthetic construct
  source 1..5711: mol_type = other DNA
gaaataagagagaaaagaagagtaagaagaaatataagagaattcgccaccatggcccctaagaaaaagcggaaggtgaatatcagcggctctagctgcggcagccccaacagcgccgacaccagcagcgacttcaaggacctgtggaccaagctgaaggaatgccacgaccgggaagtgcagggactccaggtgaaggtcaccaaactcaagcaagaaagaatcctggacgcccagagactggaagaattcttcaccaagaaccagcagctgagagagcagcagaaagtgctgcacgagacaatcaaggttctggaagatagactgcgggccggcctgtgcgacagatgcgccgtgaccgaggaacacatgcgcaaaaagcagcaggagttcgagaacattagacagcaaaatctgaaattgatcacagagctgatgaacgagagaaacacactgcaggaggagaacaagaagctgagcgagcagctgcaacagaagatcgagaatgatcagcaacaccaggccgctgagctggaatgtgaagaggacgtgatccccgacagcccaatcacagctttcagcttttctggcgtgaacagactgaggcggaaggaaaacccccacgtgcggtacatcgagcagacccataccaagctggaacacagcgtgtgtgccaacgagatgagaaaggtgtccaagtcctccacccatccccagcacaaccctaacgaaaatgagatcctggtggctgatacctacgaccagtctcagagccctatggccaaggcccacggcaccagctcttatacccctgataagagctccttcaacctggccaccgtggtggccgagacactgggcctgggcgtgcaggaggaaagcgagacacagggcccaatgagccctctgggagatgagctgtaccactgcctggaaggcaaccacaagaaacagccttttgagtccggctccgagactcctggaacaagcgagagcgctacacctgagggcagccctaagagaaaggtgtccagcgccgagggcgctgccaaggaagagcctaaacggagaagcgccagactgagcgccaagccccccgccaaggtggaagccaagcctaagaaggccgccgctaaggacaagagcagcgataagaaagtccagaccaagggcaagcggggcgccaaaggcaaacaggccgaggtggccaaccaggagacaaaggaagatctgcctgctgagaacggcgaaaccaagaccgaggaatctccagcttctgacgaggccggagagaaggaggccaaaagcgacagcggctctgagacacctggaacaagcgagagcgccaccccggaatcctatgaacaacttgcaccacaaccgtgtgtgggagaaactttacattctagcctcccacgagacagtgaactgtttgtgcctgaagaggggagcagcgagaaggagagcgaggacgcgccaaaaacatctcctccgacgcctgggaaacatggtttggaacagactggggaggaaaaagtgatggtgactgttcctgacaaaaatccaccttgtccttgctgtggtacccgggtaaactctgtgttgaatctgattgaacatctgaaagtgtcacacgggaaaaggggggtttgttttcggtgtgcaaaatgtggaaaggaaaatagtaactatcacagtgttgtttgtcattttaagaaatgcaggggtccagagacggagaaagccccagctggggagtggatttgtgaggtatgcaacagagattttacaaccaaaattggcctgggacaacacaagagattggcacacccagcagtgagaaatcaggaaaggatcgttgcttcccaaccgaaagaaacatcaaatagaggtgctcacaaaaggtgctggacaaaggaggaggaagaattactaataagactggaggctcagttcgagggaaacaaaaatattaataagcttattgcagaacacataaccaccaaaacagctaagcagatcagtgacaaaaggcgattgctgtccagaaagccagcagaggagccacgtgaggagcctggaacgtgtcatcacaccaggagagcagctgcgagcctgagaacggagcctgagatgagtcatcacgcccaggcagaggacagagataatggacctgggagacgccctctgccaggcagggcagctgccggagggagaacaatggacgagataagacgccaccctgataagggcaacggacagcagagacccaccaagcaaaaatcagaagaacagctgcaggcttactataaaaagacactagaggaacgactttcagctggggcacttaacaccttcccccgagcattcaagcaggtaatggaaggccgggatataaagctagtaatcaatcagacagcgcaggactgcttcggatgcctggaatccataagccaaataagaacggcaacccgagataaaaaggacacggtgacccgggagaaacacccaaagaaaccttttcagaagtggatgaagaagagagcaatcaaaaaaggtaattatcttcggttccagcgtttattttatcttgatagagggaaactggctaaaatcattttagatgatattgaatgcttgtcttgtgacataccactcagtgaaatttattcggtttttaaaacaagatgggaaacaactggtagctttaaaagccttggggactttaaaacttacgggaaggctgacaacactgccttcagagaattaattacggctaaagaaattgagaaaaatgtgcaggaaatgagcaaaggctcggctcccggtccagacgggattactcttggggacgtcgtaaagatggatcccgagttttcccggaccatggagattttcaatttatggttaacaactggtaaaatcccggacatggtgagggggtgcagaaccgttttgattccaaaatcatcaaagccggatcgtttgaaagacattaataactggagacctatcacgatcggttccatcttgctgagactgttctccaggattgtaacagctaggctgagcaaagcgtgccccctgaacccaaggcaaagaggctttatcagagcggcgggatgctctgaaaacttaaaactcctgcaaactataatttggtcggccaaaagagaacacagaccactgggtgttgtattcgtggacatcgccaaggcttttgacaccgtaagccaccagcacatcattcatgctttgcagcaaagagaggtggatccccacatcgtcggtctggtgagcaatatgtacgagaacatcagtacgtatatcaccacaaagaggaacacacacacagacaaaatccagatccgggttggagtaaagcagggtgacccgatgtcgccccttttatttaacctggcaatggaccctctattatgcaagctggaagagagtggcaaaggataccaccgaggacagagcagcatcacagcgatggcatttgcagacgatctggttttgctgagcgactcctgggaaaatatgaatacaaatattagcatactggagaccttctgcaatctgaccggactcaaaacacaggggcaaaagtgccacggcttttacatcaagccgacaaaggactcttacaccatcaatgactgcgctgcctggactatcaacggcacacccctgaacatgatcgaccccggcgaatctgagaaatacctcggcctgcagtttgacccgtggattggaatagcaaggtccggtctctccacaaaactagatttttggcttcagcggatcgatcaagcaccacttaaacctctgcagaaaactgatattctcaaaacatacaccatccctcggctgatctacatagctgaccactcagaagtgaaaagcgcactactcgaaacccttgaccagaagatccggacagcggtcaaggaatggcttcacctacctccgtgcacctgcgatgccatcctgtactcgagcacgagagacggcggtttgggcatcaccaaattggcaggactgatccccagcgtgcaggcccgtagactgcatcggatcgcacagtcatctgacgatacgatgaaatgcttcatggaaaaagagaaaatggaacagctgcataagaaattgtggattcaagctggaggggacagagagaacataccctcgatttgggaagcaccaccgtcgagtgaaccaccaaacaacgtgagcacaaattcggaatgggaagcaccgacccagaaagataaatttccaaagccttgcaattggaggaaaaacgaattcaaaaaatggaccaaattggcatcccaaggccgcggaattgtaaattttgaaagagacaaaattagtaaccattggatccaatactacagacgcatacctcacaggaaactcctcactgcactacaactcagggccaacgtttaccccacgagagaatttctagccaggggtagacaagaccaatacatcaaggcgtgtaggcactgcgatgcggacaacgaatcctgcgcccacatcatcggcaactgcccagtgacacaggacgcccgaatcaagaggcacaattacatctgcgaactgcttctcgaggaggcgaagaagaaggactgggtagtgttcaaggaaccgcacataagggattccaacaaggaactgtacaaacctgacctgatatttgtgaaggatgggcgtgcacttgtcgtggatgtgacagtacggtatgaagcagccaaatcatcgctggaggaagccgctgcagagaaagtgagaaagtacaaacacctggaaacggaagtaagacatctcacgaatgcaaaggacgttacttttgtgggctttcccctaggagcgcgggggaaatggcaccaagataactttaaacttttgactgagcttggcctctccaaatcgaggcaagtgaaaatggcagagactttttccacagtagcgctcttttcatctgtggacattgtacatatgtttgccagtagggccagaaaatctatggttatgtccggctccgagactcctggaacaagcgagagcgctacacctgagggcagcaccgatccacgagaaacggttccgcccggcaactccggcgaggagactatcggtgaggccttcgcctggctcaaccgcaccgtggaggccatcaatagggaggctgtcaaccacttgccccgcgagctgatctttcaggtctggcagcgttcttggcgttattggcatgacgagcagggaatgtcggagagctacaccaagtaccgctacctgtgcatcatccagaaggccgtgtacatgcacgtgcgcaaagggtgcacttgcctgggccgcggccacggccctggcggctggcggcccgggccgcctcccccgccaccccctggtctggtgggcggatctggcaaaagaaccgccgacggcagcgaattcgagcccaagaagaagaggaaagtctgataataggctgccttctgcggggcttgccttctggccatgcccttcttctctcccttgcacctgtacctcttggtctttgaataaagcctgagtaggaaggaccggtaaaaaaaaaaaaaaaaaaaaaaaaaaaaaaacgttgactaaaaaaaaaaaaaaaaaaaaaaaaaaaaaaaaaaaaaaaaaaaaaaaaaaaaaaaaaaaaaaaaaaaaaa

SEQ ID NO: 11834 - DNA, 5417 bp, synthetic construct
  source 1..5417: mol_type = other DNA
gaaataagagagaaaagaagagtaagaagaaatataagagaattcgccaccatggcccctaagaaaaagcggaaggtgaatatcagcggctctagctgcggcagccccaacagcgccgacaccagcagcgacttcaaggacctgtggaccaagctgaaggaatgccacgaccgggaagtgcagggactccaggtgaaggtcaccaaactcaagcaagaaagaatcctggacgcccagagactggaagaattcttcaccaagaaccagcagctgagagagcagcagaaagtgctgcacgagacaatcaaggttctggaagatagactgcgggccggcctgtgcgacagatgcgccgtgaccgaggaacacatgcgcaaaaagcagcaggagttcgagaacattagacagcaaaatctgaaattgatcacagagctgatgaacgagagaaacacactgcaggaggagaacaagaagctgagcgagcagctgcaacagaagatcgagaatgatcagcaacaccaggccgctgagctggaatgtgaagaggacgtgatccccgacagcccaatcacagctttcagcttttctggcgtgaacagactgaggcggaaggaaaacccccacgtgcggtacatcgagcagacccataccaagctggaacacagcgtgtgtgccaacgagatgagaaaggtgtccaagtcctccacccatccccagcacaaccctaacgaaaatgagatcctggtggctgatacctacgaccagtctcagagccctatggccaaggcccacggcaccagctcttatacccctgataagagctccttcaacctggccaccgtggtggccgagacactgggcctgggcgtgcaggaggaaagcgagacacagggcccaatgagccctctgggagatgagctgtaccactgcctggaaggcaaccacaagaaacagccttttgagtccggctccgagactcctggaacaagcgagagcgctacacctgagggcagccctaagagaaaggtgtccagcgccgagggcgctgccaaggaagagcctaaacggagaagcgccagactgagcgccaagccccccgccaaggtggaagccaagcctaagaaggccgccgctaaggacaagagcagcgataagaaagtccagaccaagggcaagcggggcgccaaaggcaaacaggccgaggtggccaaccaggagacaaaggaagatctgcctgctgagaacggcgaaaccaagaccgaggaatctccagcttctgacgaggccggagagaaggaggccaaaagcgacagcggctctgagacacctggaacaagcgagagcgccaccccggaatcctatgaacaacttgcaccacaaccgtgtgtgggagaaactttacattctagcctcccacgagacagtgaactgtttgtgcctgaagaggggagcagcgagaaggagagcgaggacgcgccaaaaacatctcctccgacgcctgggaaacatggtttggaacagactggggaggaaaaagtgatggtgactgttcctgacaaaaatccaccttgtccttgctgtggtacccgggtaaactctgtgttgaatctgattgaacatctgaaagtgtcacacgggaaaaggggggtttgttttcggtgtgcaaaatgtggaaaggaaaatagtaactatcacagtgttgtttgtcattttaagaaatgcaggggtccagagacggagaaagccccagctggggagtggatttgtgaggtatgcaacagagattttacaaccaaaattggcctgggacaacacaagagattggcacacccagcagtgagaaatcaggaaaggatcgttgcttcccaaccgaaagaaacatcaaatagaggtgctcacaaaaggtgctggacaaaggaggaggaagaattactaataagactggaggctcagttcgagggaaacaaaaatattaataagcttattgcagaacacataaccaccaaaacagctaagcagatcagtgacaaaaggcgattgctgtccagaaagccagcagaggagccacgtgaggagcctggaacgtgtcatcacaccaggagagcagctgcgagcctgagaacggagcctgagatgagtcatcacgcccaggcagaggacagagataatggacctgggagacgccctctgccaggcagggcagctgccggagggagaacaatggacgagataagacgccaccctgataagggcaacggacagcagagacccaccaagcaaaaatcagaagaacagctgcaggcttactataaaaagacactagaggaacgactttcagctggggcacttaacaccttcccccgagcattcaagcaggtaatggaaggccgggatataaagctagtaatcaatcagacagcgcaggactgcttcggatgcctggaatccataagccaaataagaacggcaacccgagataaaaaggacacggtgacccgggagaaacacccaaagaaaccttttcagaagtggatgaagaagagagcaatcaaaaaaggtaattatcttcggttccagcgtttattttatcttgatagagggaaactggctaaaatcattttagatgatattgaatgcttgtcttgtgacataccactcagtgaaatttattcggtttttaaaacaagatgggaaacaactggtagctttaaaagccttggggactttaaaacttacgggaaggctgacaacactgccttcagagaattaattacggctaaagaaattgagaaaaatgtgcaggaaatgagcaaaggctcggctcccggtccagacgggattactcttggggacgtcgtaaagatggatcccgagttttcccggaccatggagattttcaatttatggttaacaactggtaaaatcccggacatggtgagggggtgcagaaccgttttgattccaaaatcatcaaagccggatcgtttgaaagacattaataactggagacctatcacgatcggttccatcttgctgagactgttctccaggattgtaacagctaggctgagcaaagcgtgccccctgaacccaaggcaaagaggctttatcagagcggcgggatgctctgaaaacttaaaactcctgcaaactataatttggtcggccaaaagagaacacagaccactgggtgttgtattcgtggacatcgccaaggcttttgacaccgtaagccaccagcacatcattcatgctttgcagcaaagagaggtggatccccacatcgtcggtctggtgagcaatatgtacgagaacatcagtacgtatatcaccacaaagaggaacacacacacagacaaaatccagatccgggttggagtaaagcagggtgacccgatgtcgccccttttatttaacctggcaatggaccctctattatgcaagctggaagagagtggcaaaggataccaccgaggacagagcagcatcacagcgatggcatttgcagacgatctggttttgctgagcgactcctgggaaaatatgaatacaaatattagcatactggagaccttctgcaatctgaccggactcaaaacacaggggcaaaagtgccacggcttttacatcaagccgacaaaggactcttacaccatcaatgactgcgctgcctggactatcaacggcacacccctgaacatgatcgaccccggcgaatctgagaaatacctcggcctgcagtttgacccgtggattggaatagcaaggtccggtctctccacaaaactagatttttggcttcagcggatcgatcaagcaccacttaaacctctgcagaaaactgatattctcaaaacatacaccatccctcggctgatctacatagctgaccactcagaagtgaaaagcgcactactcgaaacccttgaccagaagatccggacagcggtcaaggaatggcttcacctacctccgtgcacctgcgatgccatcctgtactcgagcacgagagacggcggtttgggcatcaccaaattggcaggactgatccccagcgtgcaggcccgtagactgcatcggatcgcacagtcatctgacgatacgatgaaatgcttcatggaaaaagagaaaatggaacagctgcataagaaattgtggattcaagctggaggggacagagagaacataccctcgatttgggaagcaccaccgtcgagtgaaccaccaaacaacgtgagcacaaattcggaatgggaagcaccgacccagaaagataaatttccaaagccttgcaattggaggaaaaacgaattcaaaaaatggaccaaattggcatcccaaggccgcggaattgtaaattttgaaagagacaaaattagtaaccattggatccaatactacagacgcatacctcacaggaaactcctcactgcactacaactcagggccaacgtttaccccacgagagaatttctagccaggggtagacaagaccaatacatcaaggcgtgtaggcactgcgatgcggacaacgaatcctgcgcccacatcatcggcaactgcccagtgacacaggacgcccgaatcaagaggcacaattacatctgcgaactgcttctcgaggaggcgaagaagaaggactgggtagtgttcaaggaaccgcacataagggattccaacaaggaactgtacaaacctgacctgatatttgtgaaggatgggcgtgcacttgtcgtggatgtgacagtacggtatgaagcagccaaatcatcgctggaggaagccgctgcagagaaagtgagaaagtacaaacacctggaaacggaagtaagacatctcacgaatgcaaaggacgttacttttgtgggctttcccctaggagcgcgggggaaatggcaccaagataactttaaacttttgactgagcttggcctctccaaatcgaggcaagtgaaaatggcagagactttttccacagtagcgctcttttcatctgtggacattgtacatatgtttgccagtagggccagaaaatctatggttatgtccggctccgagactcctggaacaagcgagagcgctacacctgagggcagcgctacccgcatcggccgtttcgccaactacctgcgcaacggcggatctggcaaaagaaccgccgacggcagcgaattcgagcccaagaagaagaggaaagtctgataataggctgccttctgcggggcttgccttctggccatgcccttcttctctcccttgcacctgtacctcttggtctttgaataaagcctgagtaggaaggaccggtaaaaaaaaaaaaaaaaaaaaaaaaaaaaaaacgttgactaaaaaaaaaaaaaaaaaaaaaaaaaaaaaaaaaaaaaaaaaaaaaaaaaaaaaaaaaaaaaaaaaaaaaa

SEQ ID NO: 11835 - DNA, 4447 bp, synthetic construct
  source 1..4447: mol_type = other DNA
gcgacttgagaaggtctggttacaactgggcatagctgcagagatcgcgcctcctcgtggccccgctggtaagcccttaacagggtgactaagtcgatctctgccccagtccaggagccgctgggtttcaccagcccagcgattccttccaaattcggtgaaacaaattcctcggtaaaagccgcatggcttattgcctgaaacctggccccccggtttcagacaggggcaaagagttcggaagtggactgaccacccaccccgaacccgagagcgaatctggtcatgacccaactgtcccaaatcctggtccgtctcttggagcgggggaaggtgcacagccactacccttactcagggtatcggtgggcacccaaacctgtgaagaggactttataacatctagaccaaccaaattacccggaattgaatcagaattaggcccgctggtgaagttttctttagaggtttacaggtcagatcttaagggggatgtgcaatttgaggggattcattttccagataattggggggtactggaggggtttcctgaggtgtacgaacaactggcaccacagccaaacgggggagacgagttaaatcatagtctcccaggggacagggagggggatgtacttgagaaggatagcagcgaaaaggagaaggaggctgcaccagaggcattgccctcagtgcaaagggcccgcagtgaacagttgccagataacatcgtaaaggtgactgttcccgacaaaaatccaccatgtccctgctgtggtgtccgcttaaactcagtgttagctctgattgaacatctgaagggctcacacgggaggaggagggtgtgctttaggtgtgccaaatgtgggagggagaattttaaccaccatagtactgtttgtcattacgcaaagtgcaaaggtccacagattgaaaggccaccagtgggagagtggatctgtgaggtatgcggaagggacttcacgaccaaaattggcctgggacaacacaaaagacatatgcatgcaatggtgagaaaccaggaaaggatcgatgcttcccaaccgaaagagacatcaaatcgaggagcccacaagaggtgctggacgaaggaggaggaagaactgctcatgaagttggaggtacagtttgagaatcacaaaaacatcaataagcttatcgcagagcaattaacaactaaaacagctaaacaaattagtgataaaaggagaatgctgctcaaaaaaggtagggggacaactggtaatttggaaacagagcctgggatgagtcatcaatcgcaggcaaaagttaaggacaatggactgggtggggaccatctgccgggaggaccagttgtcgataagggaacaatagggaagccaggacaacatcttgacacagataacagccatcaaataactgctggcaagaagaaagggggagggctgcaggctcgttatagaaggagaataatgaaacgattagcggccgggacaattaacatcttccccaaagtgtttaaagaactgattaacgaccaagaggcgagaccgctaatcaatcaaacaacagaggactgctttggcctcttggactctgcatgccaaattagaacggcactccgggagaagggcaaatctcaggaggaacgaccaagaaaacagtatcagaagtggatgaagaagagagcgattaaaaggggggactatctccgcttccagcgattattccatctagacagggggaaactggcgagaattatcttggacaacactgagagcttgtcttgcgatatatcacccagtgaaatttattcggtattcaaggccagatgggaaacacctggacacttcaacggccttggggactttgaaattaaagggaaggccaacaacaaagccttcagggacttcatcacggctaaagaaattgaaaagaacgtgcgggaaatgagtaagggttcggcgccaggtccagatgggatcgcccttggggacatcaagaagatggatcccgggtattcccggaccgccgagctattcaacttgtggctgacagctggtgacatcccggacatggtgagggggtgcaggactgttttgatcccgaaatcgacgacaccggagcgcctaaaggacatcaacaactggagacccatcacgattggttccatcttgctaaggctgttctccaggatcataacggcgaggatgactaaggcgtgccccctcaacccgagacagagaggcttcatcagtgcgccgggatgctctgagaacctgaaactcctgcaatctataattcggactgccaaaaatgagcacaagccgctgggtgttattttcgtggacattgctaaggcttttgacaccgtgagccaccaacacatcatacacgttttacagcaacggagggttgacccccacattgttggactggtgaacaatatgtacaaggacatcagtacgtatgtcaccacaaagaagaacacacacacggacaaaatccagatccgggttggagtgaagcagggtgacccactatcaccccttctattcaacttggcaatggaccccctgttgtgtaagctggaagaaagtggcaaaggattccatcgaggacagagctcaataaccgcgatggcgttcgccgacgatctggtcttgttaagcgactcctgggagaacatgaaagagaacatcaaaatactggagaccttttgcaatctcaccggactcaaaacacagggtcagaagtgccacggcttttacatcaagcctacaaaggactcttacaccatcaacaactgccctgcatggaccatcaacggcacacccctgaacatgatcaaccccggggagtcagagaaatacctcggcctgcagatcgacccatggactggagtagcaaaatacgatctctccacaaaattgaaaatatggctcgaaagcattgaccgagctccacttaaacctctgcaaaaattagacatcctcaaaacatacaccattcctcgactgacctacctggctgaccattcagagatgaaagcaggggctctggaagcactcgaccagcagattcgaacagcggtcaaagactggctgcacctgccctcgtgcacctgtgatgccatcttgtacgtgagcacgagggacggcggtttgggtgttaccaagttggcgggactgattccaagtgtgcaagcccggaggctgcatcgcattgcgcagtcgccggacgagacgatgaaggacttcctagagaaggcgcagatggagaagatgtatgagaagttatgggttcaagctggaggcaaaaagaaggggatgccgtcaatttgggaggccctaccgatgactgtaccacccactaatacaggtaatctttcggagtgggaagcaccgaaccccaaaagtaagtacccaaaaccttgtgattggagaaggaaagagcttaaaaagtggacaaaattggagtcccaaggtcgtggagtcaaaaattttaggaatgatacaattagtaacgattggatccaatattatagacgcatacctcacaggaaactcctcactgccatacaactcagggccaatgtataccccacaagggaatttctcgcgcgggggaggggtgataactatgttaagttttgtaggcactgtgaagcggaccttgaaacctgtggccatatcatcggcttttgcccagtaacgaaggacgcccgaatcaagaggcacaatcgcatatgcgacaggctttgcgaggaggcagctaagagggaatgggtggtgttcaaggagccgcacttgagggatgccaccacggaactgtttaaaccggatgtgatattcgtgaaagaggaccgtgcactggttgtggatgtgacagtacgatatgaatcagccaagacaacgctggaggcagctgctatggagaaagtggacaagtacaaacatctggaggcagaagtgaaggaactcaccaacgcaaaggacgttgtttttatggggttcccccttggagcgcgagggaaattctacaaagggaactttaacttgctagagactcttggcctcccaaaaacgaggcaattgagtgtggcaaagactctatccacgtacgcgctcatgtcatctgtggacattgtgcatatgtttgccagtagatctaggaaaccaaatgtctagaccggtagacatgataagatacattgatgagtttggacaaaccacaactagaatgcagtgaaaaaaatgctttatttgtgaaatttgtgatgctattgctttatttgtaaccattataagctgcaataaacaagttaacaacaacaaaaaaaaaaaaaaaaaaaaaaaaaaaaaaacgttgactaaaaaaaaaaaaaaaaaaaaaaaaaaaaaaaaaaaaaaaaaaaaaaaaaaaaaaaaaaaaaaaaaaaaaa

SEQ ID NO: 11836 - DNA, 6299 bp, synthetic construct
  source 1..6299: mol_type = other DNA
gaaataagagagaaaagaagagtaagaagaaatataagagaattcgccaccatggcccctaagaaaaagcggaaggtgcccacactgctgggcttccacaccgccagcggcaagaaggtgaagatcgccaaggaatccctggataaggtgaaaaacctgttcgacgagaaggagcagggcggaagcggaggcggcgacagaaagacaagactgtctgagcctccaaccctggccctgagactgaagccctacaagaccgccatccagcagctgagaagcgtcatcagagccctgaaggaaaataccaccgttacattcctgcctacacccagcctgatcctgcagacagtgcgcagccactgcgtgtctaagatcacatttaattctagctgcctgtatatcaccgacaagtctttccagcctaagaccatcaacaacagcacccctctgctgggcaactttatgtacctgacctccagcaaggacctgactaaattctacgtgcaagacatctccgatctgagcgccaagatctctatgtgcgcccctgatttcaacatggaattcagcagcgcctgtgtgcatggccaggacatcgtcagagagagcgagaacagcgctgtgcacgtggacctggacttcggcgtggtggctgatctgctcaaatggatcggcccccacaccagagtgaagcggaacgtgaagaaagccccttgtcctacaggcacagtgcagatcctggtgcacgccggaccacctgctatcaagttcatccttacaaacggcagcgagctggaattcaccgccaacaaccgggtgtccttccacggcgtgaaaaacatgcggattaacgtgcaactgaaaaatttttaccagaccctgctgaactgcgccgtgaccaagctgccctgcaccctcaggattgtgaccgagcacgacaccctgctgtacgtcgccagcagaaacggcctgttcgccgtggagaacttcctgaccgaggaaccctttcagcggggtgatcctttcgacaagaactacgtgggaaatagcggcaagagcagatccggctccgagactcctggaacaagcgagagcgctacacctgagggcagcaatatcagcggctctagctgcggcagccccaacagcgccgacaccagcagcgacttcaaggacctgtggaccaagctgaaggaatgccacgaccgggaagtgcagggactccaggtgaaggtcaccaaactcaagcaagaaagaatcctggacgcccagagactggaagaattcttcaccaagaaccagcagctgagagagcagcagaaagtgctgcacgagacaatcaaggttctggaagatagactgcgggccggcctgtgcgacagatgcgccgtgaccgaggaacacatgcgcaaaaagcagcaggagttcgagaacattagacagcaaaatctgaaattgatcacagagctgatgaacgagagaaacacactgcaggaggagaacaagaagctgagcgagcagctgcaacagaagatcgagaatgatcagcaacaccaggccgctgagctggaatgtgaagaggacgtgatccccgacagcccaatcacagctttcagcttttctggcgtgaacagactgaggcggaaggaaaacccccacgtgcggtacatcgagcagacccataccaagctggaacacagcgtgtgtgccaacgagatgagaaaggtgtccaagtcctccacccatccccagcacaaccctaacgaaaatgagatcctggtggctgatacctacgaccagtctcagagccctatggccaaggcccacggcaccagctcttatacccctgataagagctccttcaacctggccaccgtggtggccgagacactgggcctgggcgtgcaggaggaaagcgagacacagggcccaatgagccctctgggagatgagctgtaccactgcctggaaggcaaccacaagaaacagccttttgagtccggctccgagactcctggaacaagcgagagcgctacacctgagggcagccctaagagaaaggtgtccagcgccgagggcgctgccaaggaagagcctaaacggagaagcgccagactgagcgccaagccccccgccaaggtggaagccaagcctaagaaggccgccgctaaggacaagagcagcgataagaaagtccagaccaagggcaagcggggcgccaaaggcaaacaggccgaggtggccaaccaggagacaaaggaagatctgcctgctgagaacggcgaaaccaagaccgaggaatctccagcttctgacgaggccggagagaaggaggccaaaagcgacagcggctctgagacacctggaacaagcgagagcgccaccccggaatcctatgaacaacttgcaccacaaccgtgtgtgggagaaactttacattctagcctcccacgagacagtgaactgtttgtgcctgaagaggggagcagcgagaaggagagcgaggacgcgccaaaaacatctcctccgacgcctgggaaacatggtttggaacagactggggaggaaaaagtgatggtgactgttcctgacaaaaatccaccttgtccttgctgtggtacccgggtaaactctgtgttgaatctgattgaacatctgaaagtgtcacacgggaaaaggggggtttgttttcggtgtgcaaaatgtggaaaggaaaatagtaactatcacagtgttgtttgtcattttaagaaatgcaggggtccagagacggagaaagccccagctggggagtggatttgtgaggtatgcaacagagattttacaaccaaaattggcctgggacaacacaagagattggcacacccagcagtgagaaatcaggaaaggatcgttgcttcccaaccgaaagaaacatcaaatagaggtgctcacaaaaggtgctggacaaaggaggaggaagaattactaataagactggaggctcagttcgagggaaacaaaaatattaataagcttattgcagaacacataaccaccaaaacagctaagcagatcagtgacaaaaggcgattgctgtccagaaagccagcagaggagccacgtgaggagcctggaacgtgtcatcacaccaggagagcagctgcgagcctgagaacggagcctgagatgagtcatcacgcccaggcagaggacagagataatggacctgggagacgccctctgccaggcagggcagctgccggagggagaacaatggacgagataagacgccaccctgataagggcaacggacagcagagacccaccaagcaaaaatcagaagaacagctgcaggcttactataaaaagacactagaggaacgactttcagctggggcacttaacaccttcccccgagcattcaagcaggtaatggaaggccgggatataaagctagtaatcaatcagacagcgcaggactgcttcggatgcctggaatccataagccaaataagaacggcaacccgagataaaaaggacacggtgacccgggagaaacacccaaagaaaccttttcagaagtggatgaagaagagagcaatcaaaaaaggtaattatcttcggttccagcgtttattttatcttgatagagggaaactggctaaaatcattttagatgatattgaatgcttgtcttgtgacataccactcagtgaaatttattcggtttttaaaacaagatgggaaacaactggtagctttaaaagccttggggactttaaaacttacgggaaggctgacaacactgccttcagagaattaattacggctaaagaaattgagaaaaatgtgcaggaaatgagcaaaggctcggctcccggtccagacgggattactcttggggacgtcgtaaagatggatcccgagttttcccggaccatggagattttcaatttatggttaacaactggtaaaatcccggacatggtgagggggtgcagaaccgttttgattccaaaatcatcaaagccggatcgtttgaaagacattaataactggagacctatcacgatcggttccatcttgctgagactgttctccaggattgtaacagctaggctgagcaaagcgtgccccctgaacccaaggcaaagaggctttatcagagcggcgggatgctctgaaaacttaaaactcctgcaaactataatttggtcggccaaaagagaacacagaccactgggtgttgtattcgtggacatcgccaaggcttttgacaccgtaagccaccagcacatcattcatgctttgcagcaaagagaggtggatccccacatcgtcggtctggtgagcaatatgtacgagaacatcagtacgtatatcaccacaaagaggaacacacacacagacaaaatccagatccgggttggagtaaagcagggtgacccgatgtcgccccttttatttaacctggcaatggaccctctattatgcaagctggaagagagtggcaaaggataccaccgaggacagagcagcatcacagcgatggcatttgcagacgatctggttttgctgagcgactcctgggaaaatatgaatacaaatattagcatactggagaccttctgcaatctgaccggactcaaaacacaggggcaaaagtgccacggcttttacatcaagccgacaaaggactcttacaccatcaatgactgcgctgcctggactatcaacggcacacccctgaacatgatcgaccccggcgaatctgagaaatacctcggcctgcagtttgacccgtggattggaatagcaaggtccggtctctccacaaaactagatttttggcttcagcggatcgatcaagcaccacttaaacctctgcagaaaactgatattctcaaaacatacaccatccctcggctgatctacatagctgaccactcagaagtgaaaagcgcactactcgaaacccttgaccagaagatccggacagcggtcaaggaatggcttcacctacctccgtgcacctgcgatgccatcctgtactcgagcacgagagacggcggtttgggcatcaccaaattggcaggactgatccccagcgtgcaggcccgtagactgcatcggatcgcacagtcatctgacgatacgatgaaatgcttcatggaaaaagagaaaatggaacagctgcataagaaattgtggattcaagctggaggggacagagagaacataccctcgatttgggaagcaccaccgtcgagtgaaccaccaaacaacgtgagcacaaattcggaatgggaagcaccgacccagaaagataaatttccaaagccttgcaattggaggaaaaacgaattcaaaaaatggaccaaattggcatcccaaggccgcggaattgtaaattttgaaagagacaaaattagtaaccattggatccaatactacagacgcatacctcacaggaaactcctcactgcactacaactcagggccaacgtttaccccacgagagaatttctagccaggggtagacaagaccaatacatcaaggcgtgtaggcactgcgatgcggacaacgaatcctgcgcccacatcatcggcaactgcccagtgacacaggacgcccgaatcaagaggcacaattacatctgcgaactgcttctcgaggaggcgaagaagaaggactgggtagtgttcaaggaaccgcacataagggattccaacaaggaactgtacaaacctgacctgatatttgtgaaggatgggcgtgcacttgtcgtggatgtgacagtacggtatgaagcagccaaatcatcgctggaggaagccgctgcagagaaagtgagaaagtacaaacacctggaaacggaagtaagacatctcacgaatgcaaaggacgttacttttgtgggctttcccctaggagcgcgggggaaatggcaccaagataactttaaacttttgactgagcttggcctctccaaatcgaggcaagtgaaaatggcagagactttttccacagtagcgctcttttcatctgtggacattgtacatatgtttgccagtagggccagaaaatctatggttatgtgataataggctgccttctgcggggcttgccttctggccatgcccttcttctctcccttgcacctgtacctcttggtctttgaataaagcctgagtaggaaggaccggtaaaaaaaaaaaaaaaaaaaaaaaaaaaaaaacgttgactaaaaaaaaaaaaaaaaaaaaaaaaaaaaaaaaaaaaaaaaaaaaaaaaaaaaaaaaaaaaaaaaaaaaaa

SEQ ID NO: 11837 - DNA, 6196 bp, synthetic construct
  source 1..6196: mol_type = other DNA
gggaaataagagagaaaagaagagtaagaagaaatataagagccaccatggcccctaagaaaaagcggaaggtggacagaaagacaagactgtctgagcctccaaccctggccctgagactgaagccctacaagaccgccatccagcagctgagaagcgtcatcagagccctgaaggaaaataccaccgttacattcctgcctacacccagcctgatcctgcagacagtgcgcagccactgcgtgtctaagatcacatttaattctagctgcctgtatatcaccgacaagtctttccagcctaagaccatcaacaacagcacccctctgctgggcaactttatgtacctgacctccagcaaggacctgactaaattctacgtgcaagacatctccgatctgagcgccaagatctctatgtgcgcccctgatttcaacatggaattcagcagcgcctgtgtgcatggccaggacatcgtcagagagagcgagaacagcgctgtgcacgtggacctggacttcggcgtggtggctgatctgctcaaatggatcggcccccacaccagagtgaagcggaacgtgaagaaagccccttgtcctacaggcacagtgcagatcctggtgcacgccggaccacctgctatcaagttcatccttacaaacggcagcgagctggaattcaccgccaacaaccgggtgtccttccacggcgtgaaaaacatgcggattaacgtgcaactgaaaaatttttaccagaccctgctgaactgcgccgtgaccaagctgccctgcaccctcaggattgtgaccgagcacgacaccctgctgtacgtcgccagcagaaacggcctgttcgccgtggagaacttcctgaccgaggaaccctttcagcggggtgatcctttcgacaagaactacgtgggaaatagcggcaagagcagatccggctccgagactcctggaacaagcgagagcgctacacctgagggcagcaatatcagcggctctagctgcggcagccccaacagcgccgacaccagcagcgacttcaaggacctgtggaccaagctgaaggaatgccacgaccgggaagtgcagggactccaggtgaaggtcaccaaactcaagcaagaaagaatcctggacgcccagagactggaagaattcttcaccaagaaccagcagctgagagagcagcagaaagtgctgcacgagacaatcaaggttctggaagatagactgcgggccggcctgtgcgacagatgcgccgtgaccgaggaacacatgcgcaaaaagcagcaggagttcgagaacattagacagcaaaatctgaaattgatcacagagctgatgaacgagagaaacacactgcaggaggagaacaagaagctgagcgagcagctgcaacagaagatcgagaatgatcagcaacaccaggccgctgagctggaatgtgaagaggacgtgatccccgacagcccaatcacagctttcagcttttctggcgtgaacagactgaggcggaaggaaaacccccacgtgcggtacatcgagcagacccataccaagctggaacacagcgtgtgtgccaacgagatgagaaaggtgtccaagtcctccacccatccccagcacaaccctaacgaaaatgagatcctggtggctgatacctacgaccagtctcagagccctatggccaaggcccacggcaccagctcttatacccctgataagagctccttcaacctggccaccgtggtggccgagacactgggcctgggcgtgcaggaggaaagcgagacacagggcccaatgagccctctgggagatgagctgtaccactgcctggaaggcaaccacaagaaacagccttttgagtccggctccgagactcctggaacaagcgagagcgctacacctgagggcagccctaagagaaaggtgtccagcgccgagggcgctgccaaggaagagcctaaacggagaagcgccagactgagcgccaagccccccgccaaggtggaagccaagcctaagaaggccgccgctaaggacaagagcagcgataagaaagtccagaccaagggcaagcggggcgccaaaggcaaacaggccgaggtggccaaccaggagacaaaggaagatctgcctgctgagaacggcgaaaccaagaccgaggaatctccagcttctgacgaggccggagagaaggaggccaaaagcgacagcggctctgagacacctggaacaagcgagagcgccaccccggaatcctatgaacaacttgcaccacaaccgtgtgtgggagaaactttacattctagcctcccacgagacagtgaactgtttgtgcctgaagaggggagcagcgagaaggagagcgaggacgcgccaaaaacatctcctccgacgcctgggaaacatggtttggaacagactggggaggaaaaagtgatggtgactgttcctgacaaaaatccaccttgtccttgctgtggtacccgggtaaactctgtgttgaatctgattgaacatctgaaagtgtcacacgggaaaaggggggtttgttttcggtgtgcaaaatgtggaaaggaaaatagtaactatcacagtgttgtttgtcattttaagaaatgcaggggtccagagacggagaaagccccagctggggagtggatttgtgaggtatgcaacagagattttacaaccaaaattggcctgggacaacacaagagattggcacacccagcagtgagaaatcaggaaaggatcgttgcttcccaaccgaaagaaacatcaaatagaggtgctcacaaaaggtgctggacaaaggaggaggaagaattactaataagactggaggctcagttcgagggaaacaaaaatattaataagcttattgcagaacacataaccaccaaaacagctaagcagatcagtgacaaaaggcgattgctgtccagaaagccagcagaggagccacgtgaggagcctggaacgtgtcatcacaccaggagagcagctgcgagcctgagaacggagcctgagatgagtcatcacgcccaggcagaggacagagataatggacctgggagacgccctctgccaggcagggcagctgccggagggagaacaatggacgagataagacgccaccctgataagggcaacggacagcagagacccaccaagcaaaaatcagaagaacagctgcaggcttactataaaaagacactagaggaacgactttcagctggggcacttaacaccttcccccgagcattcaagcaggtaatggaaggccgggatataaagctagtaatcaatcagacagcgcaggactgcttcggatgcctggaatccataagccaaataagaacggcaacccgagataaaaaggacacggtgacccgggagaaacacccaaagaaaccttttcagaagtggatgaagaagagagcaatcaaaaaaggtaattatcttcggttccagcgtttattttatcttgatagagggaaactggctaaaatcattttagatgatattgaatgcttgtcttgtgacataccactcagtgaaatttattcggtttttaaaacaagatgggaaacaactggtagctttaaaagccttggggactttaaaacttacgggaaggctgacaacactgccttcagagaattaattacggctaaagaaattgagaaaaatgtgcaggaaatgagcaaaggctcggctcccggtccagacgggattactcttggggacgtcgtaaagatggatcccgagttttcccggaccatggagattttcaatttatggttaacaactggtaaaatcccggacatggtgagggggtgcagaaccgttttgattccaaaatcatcaaagccggatcgtttgaaagacattaataactggagacctatcacgatcggttccatcttgctgagactgttctccaggattgtaacagctaggctgagcaaagcgtgccccctgaacccaaggcaaagaggctttatcagagcggcgggatgctctgaaaacttaaaactcctgcaaactataatttggtcggccaaaagagaacacagaccactgggtgttgtattcgtggacatcgccaaggcttttgacaccgtaagccaccagcacatcattcatgctttgcagcaaagagaggtggatccccacatcgtcggtctggtgagcaatatgtacgagaacatcagtacgtatatcaccacaaagaggaacacacacacagacaaaatccagatccgggttggagtaaagcagggtgacccgatgtcgccccttttatttaacctggcaatggaccctctattatgcaagctggaagagagtggcaaaggataccaccgaggacagagcagcatcacagcgatggcatttgcagacgatctggttttgctgagcgactcctgggaaaatatgaatacaaatattagcatactggagaccttctgcaatctgaccggactcaaaacacaggggcaaaagtgccacggcttttacatcaagccgacaaaggactcttacaccatcaatgactgcgctgcctggactatcaacggcacacccctgaacatgatcgaccccggcgaatctgagaaatacctcggcctgcagtttgacccgtggattggaatagcaaggtccggtctctccacaaaactagatttttggcttcagcggatcgatcaagcaccacttaaacctctgcagaaaactgatattctcaaaacatacaccatccctcggctgatctacatagctgaccactcagaagtgaaaagcgcactactcgaaacccttgaccagaagatccggacagcggtcaaggaatggcttcacctacctccgtgcacctgcgatgccatcctgtactcgagcacgagagacggcggtttgggcatcaccaaattggcaggactgatccccagcgtgcaggcccgtagactgcatcggatcgcacagtcatctgacgatacgatgaaatgcttcatggaaaaagagaaaatggaacagctgcataagaaattgtggattcaagctggaggggacagagagaacataccctcgatttgggaagcaccaccgtcgagtgaaccaccaaacaacgtgagcacaaattcggaatgggaagcaccgacccagaaagataaatttccaaagccttgcaattggaggaaaaacgaattcaaaaaatggaccaaattggcatcccaaggccgcggaattgtaaattttgaaagagacaaaattagtaaccattggatccaatactacagacgcatacctcacaggaaactcctcactgcactacaactcagggccaacgtttaccccacgagagaatttctagccaggggtagacaagaccaatacatcaaggcgtgtaggcactgcgatgcggacaacgaatcctgcgcccacatcatcggcaactgcccagtgacacaggacgcccgaatcaagaggcacaattacatctgcgaactgcttctcgaggaggcgaagaagaaggactgggtagtgttcaaggaaccgcacataagggattccaacaaggaactgtacaaacctgacctgatatttgtgaaggatgggcgtgcacttgtcgtggatgtgacagtacggtatgaagcagccaaatcatcgctggaggaagccgctgcagagaaagtgagaaagtacaaacacctggaaacggaagtaagacatctcacgaatgcaaaggacgttacttttgtgggctttcccctaggagcgcgggggaaatggcaccaagataactttaaacttttgactgagcttggcctctccaaatcgaggcaagtgaaaatggcagagactttttccacagtagcgctcttttcatctgtggacattgtacatatgtttgccagtagggccagaaaatctatggttatgtgataataggctggagcctcggtggccatgcttcttgccccttgggcctccccccagcccctcctccccttcctgcacccgtacccccgtggtctttgaataaagtctgagtgggcggcagaccggtaaaaaaaaaaaaaaaaaaaaaaaaaaaaaaacgttgactaaaaaaaaaaaaaaaaaaaaaaaaaaaaaaaaaaaaaaaaaaaaaaaaaaaaaaaaaaaaaaaaaaaaaa

SEQ ID NO: 11838-11840 - skipped (3 entries)

SEQ ID NO: 11841 - DNA, 4046 bp, synthetic construct; identical to SEQ ID NO: 10770
  source 1..4046: mol_type = other DNA

SEQ ID NO: 11842 - DNA, 3983 bp, synthetic construct; identical to SEQ ID NO: 10771
  source 1..3983: mol_type = other DNA

SEQ ID NO: 11843 - DNA, 3983 bp, synthetic construct; identical to SEQ ID NO: 10774
  source 1..3983: mol_type = other DNA

SEQ ID NO: 11844 - DNA, 3983 bp, synthetic construct; identical to SEQ ID NO: 10769
  source 1..3983: mol_type = other DNA

SEQ ID NO: 11845 - DNA, 4358 bp, synthetic construct
  source 1..4358: mol_type = other DNA
gaaataagagagaaaagaagagtaagaagaaatataagagaattcgccaccatgtggcctcccacgtttcagggcggacctattcctatgggcagtggcagcgacttgggtggaggagtgtggttccgggcccctgccagactcagcagggtgtctgtgggcagccaaacatccccctctgattgggtcgacctgctgagctggaacttcaacttcctgccaggctcaaagtcccagagagtggacctgctgtctagacactgggtggacctgctgagcaagaatgaccaggtagatctggtggcccagaacctgcctagcaaactgtctcccgacagcgccgaaaacgagctggccctgctggtgaatctggagttctacagatccgacctgcacgagggcgtgcactttagcgctaactgggagggcctgagcggcctgcctgaagtgtacgagcagctggcccctcagccctgtgcaggagacagcagccactcgagcctcccccgggacaccaaactgtttgtgctggaacagaaaggcagcgtggagaaagagtctgaggacgttcccaagaccagcccccccaccccaggcaagcctggtgaacagaccccagaagagaccgtgacagtgacagtgcctgacaagaaccctccttgcccttgctgcggcaccagactgaattctgtgctgggtctgatcgaacacctgaagggcagccacggcaaaaagcgggtgtgcttcagatgcgtgaagtgcgggaaagaggggaccaactatcatagcatcgtgtgtcacttcccgaagtgcagaggcgctgaaacagaggccgcccccgccggagaatggatctgcgaagtctgtggccgggacttccaaactaagatcggactgggccagcacaagagacatgcccatcctctgatccggaatcaagagagaatcgccgcttctcaccctaaggaaacatccaatagaggcgcccacaaacggtgctggacaaaggaagaggaagaaatgctgatcaagctcgaggctcagttcgagggccacaagaacatcaataagctcatcgccgagcacattaccagcaagaccgccaagcaaatctccgataagcggagattgctgcctcggaagcctgacaaagatctggaggaggaacctgccgtgtctaccagaacccgtagagccgctgccggcctgagaaaggaacctggcgtgagccaccagtctcaggcgaccatcgaggacaatggacctggcagaagccacagacccggcaagcctgccgccggcaaaaagacaatggatgagatctctcacagacctgataagggaaatggtcggagaggcacaatcaagcagcagatggccggccagttgcaggcccactaccacagaacactgggcgaaagactgagcgcgggcgccatcaacaccttccccagggccttcaagcagctgatggaaggacaggaaatgcaggagaccattaaccaaagcgcccaggattgcttcggctgcctggagagcatcagccagattagaaccgccacacgtgataagatcaacaagggcacaagagaaaaacaccctaagagacctttccagaagtggatgaaaaagcgggccatcaggaagggcaactacctgagattccagcgtctgtttcacctggatcggggcaagctggctaagatcatcctggacgacgttgaaaccctgagctgcgacatcccgcctagcgagatctacagcgtgttcaaggacagatgggaaacccctggcaacttcaacagcctgggagagtttcaaagcaacggcaaagctgataacagcgcctttagagacctgattaccgccaaagagatcgagaagaacgtccaggagatgtcaaagggaagtgcccctggccctgacggcatcacactgggcgacgtgaagaagatggaccctgagtacagcagaaccgctgagatcttcaacctgtggctgaccagtggcaagatccctgatatggtgcgcggctgtagaacagtacttattccgaaaagcacagagcccgagagactgaaggacatcaacaactggcggccaatcacaatcggcagcatcctgctgcgcctgtttagccggatcgtgaccgcacggctgagcaaggcctgtcctctgaacccccgccagagaggattcatccgggccgccggatgcagcgagaacctgaagctgctgcagagcgtgatgagatccgccaagaaagagcaccgtcctctgggcgtcgtgttcgtggacatcgccaaggcgttcgacaccatcagccaccaacacatcatccacgccctgcaacagcgggaagtggacccccacattattggccttgtgtctaacatgtacaaagacacaagcacctatatcaccgtgaagaagaacacccacaccgacgagatccacttcagagtcggcgtgaagcagggcgatcctatgagccctttgctgttcaatctggccatggaccccctgctgtgcaagctcgaagagtccggcaagggctaccacagaggcagaagcagcatcaccgccatggctttcgccgatgacctggttctgctgagcgattcttgggagaacatggaaaccaacatcaagatcctggagacattctgcaacctaaccggactgaaaacccagggcgtgaaatgccacggctactacatcaagcctaccaaagattcctacaccgtgaacgactgcgccgcttggaccatcaacggcacccctctgaacatgattgaccctggagaaaccgagaagtacctgggcctgcagatcgacccctggacaggcatcgccaagagcaatctgtctacaaagctggagtattggctgcagcgcatcgaccaggctccccttaaacctctgcagaaagtggatatcctgaaaacctacaccatccctagaatgacctacctggccgatcactccgacctgaaggctggcttcctggaaagcctggaccagaagattcgcaccacagtgaaggactggctgcatctgcctagctgtacatgcgacgccatcctgtactccagcacaaaggatggtggtctgggcatcacaaagctggccggtctgatccccagcgtgcaggcccggagactgcatcgaatcgcccagagctcggacgagaccatgaaaatgttcctggagaaggatcagatggaacaaatgcacaagaaactgtggatccaggcgggcggcgaccgggaaaagatcccctccatctgggacgcccctcctgtgtctgagccttcaaattcagcctctacaatcagcgaatgggaggccccaagcctcaagaccaagttccctaagccttgtaattggagaaagaacgagttcaagaactggaccaagctggtctcccagggcagaggaatcatcaactttgagggcgacaagatcagcaaccactggctccaatactacagaagcatccctcaccggaagctgctgacagccctgcagctgagagcaaacgtctaccccaccagagagtttctggcgagaggccggcaggacaagtacatcaaggcgtgcagacactgtgatgccgatatcgagtcttgcgcccacatcatcggcaactgccccgtgacccaggacgccagaatcaagcggcacaactacatctgcgaggtgctgctggaggaagccaaaaagaaagattgggtggtgttccaggagccacacatccgtgacaccaccaaggagctgtacaagcccgacctcatctttgtgaaggacgcccgggccctggtggtggacgtgaccgtgcggtacgaggccgctaagaccagcctggaggacgcagctgccgaaaaggtgaacaaatacaaacacctggaaacagaggtgcggaacctgaccaacgccaaggacgtggccttcatgggcttccccctcggcgctagaggcaagtggcaccagaagaacttcgagctgctggaagcacttggcctgagcaagtctcgccaggaaaagatcgccagaaccctgagtaccacagccctgcttagcagcgtggacatcgtgagaatgttcgcctcgcgggcccggaaactgggcaaccaggagtgataataggctgccttctgcggggcttgccttctggccatgcccttcttctctcccttgcacctgtacctcttggtctttgaataaagcctgagtaggaaggaccggtaaaaaaaaaaaaaaaaaaaaaaaaaaaaaaacgttgactaaaaaaaaaaaaaaaaaaaaaaaaaaaaaaaaaaaaaaaaaaaaaaaaaaaaaaaaaaaaaaaaaaaaaa

SEQ ID NO: 11846 - DNA, 4022 bp, synthetic construct; identical to SEQ ID NO: 10772
  source 1..4022: mol_type = other DNA

SEQ ID NO: 11847 - DNA, 4022 bp, synthetic construct; identical to SEQ ID NO: 10773
  source 1..4022: mol_type = other DNA

SEQ ID NO: 11848 - DNA, 4022 bp, synthetic construct; identical to SEQ ID NO: 10765
  source 1..4022: mol_type = other DNA

SEQ ID NO: 11849 - DNA, 4433 bp, synthetic construct; identical to SEQ ID NO: 10766
  source 1..4433: mol_type = other DNA

SEQ ID NO: 11850 - DNA, 4436 bp, synthetic construct; identical to SEQ ID NO: 10767
  source 1..4436: mol_type = other DNA

SEQ ID NO: 11851 - DNA, 5264 bp, synthetic construct; identical to SEQ ID NO: 10975
  source 1..5264: mol_type = other DNA

SEQ ID NO: 11852-11975 - skipped (124 entries)

SEQ ID NO: 11976 - DNA, 5264 bp, synthetic construct
  source 1..5264: mol_type = other DNA
gaaataagagagaaaagaagagtaagaagaaatataagagaattcgccaccatggcccctaagaaaaagcggaaggtgaatatcagcggctctagctgcggcagccccaacagcgccgacaccagcagcgacttcaaggacctgtggaccaagctgaaggaatgccacgaccgggaagtgcagggactccaggtgaaggtcaccaaactcaagcaagaaagaatcctggacgcccagagactggaagaattcttcaccaagaaccagcagctgagagagcagcagaaagtgctgcacgagacaatcaaggttctggaagatagactgcgggccggcctgtgcgacagatgcgccgtgaccgaggaacacatgcgcaaaaagcagcaggagttcgagaacattagacagcaaaatctgaaattgatcacagagctgatgaacgagagaaacacactgcaggaggagaacaagaagctgagcgagcagctgcaacagaagatcgagaatgatcagcaacaccaggccgctgagctggaatgtgaagaggacgtgatccccgacagcccaatcacagctttcagcttttctggcgtgaacagactgaggcggaaggaaaacccccacgtgcggtacatcgagcagacccataccaagctggaacacagcgtgtgtgccaacgagatgagaaaggtgtccaagtcctccacccatccccagcacaaccctaacgaaaatgagatcctggtggctgatacctacgaccagtctcagagccctatggccaaggcccacggcaccagctcttatacccctgataagagctccttcaacctggccaccgtggtggccgagacactgggcctgggcgtgcaggaggaaagcgagacacagggcccaatgagccctctgggagatgagctgtaccactgcctggaaggcaaccacaagaaacagccttttgagtccggctccgagactcctggaacaagcgagagcgctacacctgagggcagccctaagagaaaggtgtccagcgccgagggcgctgccaaggaagagcctaaacggagaagcgccagactgagcgccaagccccccgccaaggtggaagccaagcctaagaaggccgccgctaaggacaagagcagcgataagaaagtccagaccaagggcaagcggggcgccaaaggcaaacaggccgaggtggccaaccaggagacaaaggaagatctgcctgctgagaacggcgaaaccaagaccgaggaatctccagcttctgacgaggccggagagaaggaggccaaaagcgacagcggctctgagacacctggaacaagcgagagcgccaccccggaatcctatgaacaacttgcaccacaaccgtgtgtgggagaaactttacattctagcctcccacgagacagtgaactgtttgtgcctgaagaggggagcagcgagaaggagagcgaggacgcgccaaaaacatctcctccgacgcctgggaaacatggtttggaacagactggggaggaaaaagtgatggtgactgttcctgacaaaaatccaccttgtccttgctgtggtacccgggtaaactctgtgttgaatctgattgaacatctgaaagtgtcacacgggaaaaggggggtttgttttcggtgtgcaaaatgtggaaaggaaaatagtaactatcacagtgttgtttgtcattttaagaaatgcaggggtccagagacggagaaagccccagctggggagtggatttgtgaggtatgcaacagagattttacaaccaaaattggcctgggacaacacaagagattggcacacccagcagtgagaaatcaggaaaggatcgttgcttcccaaccgaaagaaacatcaaatagaggtgctcacaaaaggtgctggacaaaggaggaggaagaattactaataagactggaggctcagttcgagggaaacaaaaatattaataagcttattgcagaacacataaccaccaaaacagctaagcagatcagtgacaaaaggcgattgctgtccagaaagccagcagaggagccacgtgaggagcctggaacgtgtcatcacaccaggagagcagctgcgagcctgagaacggagcctgagatgagtcatcacgcccaggcagaggacagagataatggacctgggaaacgccctgccccaggcagggcagctgccggagggagaacaatggacgagataagacgccaccctgataagggcaacggacagcagagacccaccaagcaaaaatcagaagaacagctgcaggcttactataaaaagacactagaggaacgactttcagctggggcacttaacaccttcccccgagcattcaagcaggtaatggaaggccgggatataaagctagtaatcaatcagacagcgcaggactgcttcggatgcctggaatccataagccaaataagaacggcaacccgagataaaaaggacacggtgacccgggagaaacacccaaagaaaccttttcagaagtggatgaagaagagagcaatcaaaaaaggtaattatcttcggttccagcgtttattttatcttgatagagggaaactggctaaaatcattttagatgatattgaatgcttgtcttgtgacataccactcagtgaaatttattcggtttttaaaacaagatgggaaacaactggtagctttaaaagccttggggactttaaaacttacgggaaggctgacaacactgccttcagagaattaattacggctaaagaaattgagaaaaatgtgcaggaaatgagcaaaggctcggctcccggtccagacgggattactcttggggacgtcgtaaagatggatcccgagttttcccggaccatggagattttcaatttatggttaacaactggtaaaatcccggacatggtgagggggtgcagaaccgttttgattccaaaatcatcaaagccggatcgtttgaaagacattaataactggagacctatcacgatcggttccatcttgctgagactgttctccaggattgtaacagctaggctgagcaaagcgtgccccctgaacccaaggcaaagaggctttatcagagcggcgggatgctctgaaaacttaaaactcctgcaaactataatttggtcggccaaaagagaacacagaccactgggtgttgtattcgtggacatcgccaaggcttttgacaccgtaagccaccagcacatcattcatgctttgcagcaaagagaggtggatccccacatcgtcggtctggtgagcaatatgtacgagaacatcagtacgtatatcaccacaaagaggaacacacacacagacaaaatccagatccgggttggagtaaagcagggtgacccgatgtcgccccttttatttaacctggcaatggaccctctattatgcaagctggaagagagtggcaaaggataccaccgaggacagagcagcatcacagcgatggcatttgcagacgatctggttttgctgagcgactcctgggaaaatatgaatacaaatattagcatactggagaccttctgcaatctgaccggactcaaaacacaggggcaaaagtgccacggcttttacatcaagccgacaaaggactcttacaccatcaatgactgcgctgcctggactatcaacggcacacccctgaacatgatcgaccccggcgaatctgagaaatacctcggcctgcagtttgacccgtggattggaatagcaaggtccggtctctccacaaaactagatttttggcttcagcggatcgatcaagcaccacttaaacctctgcagaaaactgatattctcaaaacatacaccatccctcggctgatctacatagctgaccactcagaagtgaaaagcgcactactcgaaacccttgaccagaagatccggacagcggtcaaggaatggcttcacctacctccgtgcacctgcgatgccatcctgtactcgagcacgagagacggcggtttgggcatcaccaaattggcaggactgatccccagcgtgcaggcccgtagactgcatcggatcgcacagtcatctgacgatacgatgaaatgcttcatggaaaaagagaaaatggaacagctgcataagaaattgtggattcaagctggaggggacagagagaacataccctcgatttgggaagcaccaccgtcgagtgaaccaccaaacaacgtgagcacaaattcggaatgggaagcaccgacccagaaagataaatttccaaagccttgcaattggaggaaaaacgaattcaaaaaatggaccaaattggcatcccaaggccgcggaattgtaaattttgaaagagacaaaattagtaaccattggatccaatactacagacgcatacctcacaggaaactcctcactgcactacaactcagggccaacgtttaccccacgagagaatttctagccaggggtagacaagaccaatacatcaaggcgtgtaggcactgcgatgcggacaacgaatcctgcgcccacatcatcggcaactgcccagtgacacaggacgcccgaatcaagaggcacaattacatctgcgaactgcttctcgaggaggcgaagaagaaggactgggtagtgttcaaggaaccgcacataagggattccaacaaggaactgtacaaacctgacctgatatttgtgaaggatgggcgtgcacttgtcgtggatgtgacagtacggtatgaagcagccaaatcatcgctggaggaagccgctgcagagaaagtgagaaagtacaaacacctggaaacggaagtaagacatctcacgaatgcaaaggacgttacttttgtgggctttcccctaggagcgcgggggaaatggcaccaagataactttaaacttttgactgagcttggcctctccaaatcgaggcaagtgaaaatggcagagactttttccacagtagcgctcttttcatctgtggacattgtacatatgtttgccagtagggccagaaaatctatggttatgtgataataggctgccttctgcggggcttgccttctggccatgcccttcttctctcccttgcacctgtacctcttggtctttgaataaagcctgagtaggaaggaccggtaaaaaaaaaaaaaaaaaaaaaaaaaaaaaaacgttgactaaaaaaaaaaaaaaaaaaaaaaaaaaaaaaaaaaaaaaaaaaaaaaaaaaaaaaaaaaaaaaaaaaaaaa

SEQ ID NO: 11977 - DNA, 5264 bp, synthetic construct
  source 1..5264: mol_type = other DNA
gaaataagagagaaaagaagagtaagaagaaatataagagaattcgccaccatggcccctaagaaaaagcggaaggtgaatatcagcggctctagctgcggcagccccaacagcgccgacaccagcagcgacttcaaggacctgtggaccaagctgaaggaatgccacgaccgggaagtgcagggactccaggtgaaggtcaccaaactcaagcaagaaagaatcctggacgcccagagactggaagaattcttcaccaagaaccagcagctgagagagcagcagaaagtgctgcacgagacaatcaaggttctggaagatagactgcgggccggcctgtgcgacagatgcgccgtgaccgaggaacacatgcgcaaaaagcagcaggagttcgagaacattagacagcaaaatctgaaattgatcacagagctgatgaacgagagaaacacactgcaggaggagaacaagaagctgagcgagcagctgcaacagaagatcgagaatgatcagcaacaccaggccgctgagctggaatgtgaagaggacgtgatccccgacagcccaatcacagctttcagcttttctggcgtgaacagactgaggcggaaggaaaacccccacgtgcggtacatcgagcagacccataccaagctggaacacagcgtgtgtgccaacgagatgagaaaggtgtccaagtcctccacccatccccagcacaaccctaacgaaaatgagatcctggtggctgatacctacgaccagtctcagagccctatggccaaggcccacggcaccagctcttatacccctgataagagctccttcaacctggccaccgtggtggccgagacactgggcctgggcgtgcaggaggaaagcgagacacagggcccaatgagccctctgggagatgagctgtaccactgcctggaaggcaaccacaagaaacagccttttgagtccggctccgagactcctggaacaagcgagagcgctacacctgagggcagccctaagagaaaggtgtccagcgccgagggcgctgccaaggaagagcctaaacggagaagcgccagactgagcgccaagccccccgccaaggtggaagccaagcctaagaaggccgccgctaaggacaagagcagcgataagaaagtccagaccaagggcaagcggggcgccaaaggcaaacaggccgaggtggccaaccaggagacaaaggaagatctgcctgctgagaacggcgaaaccaagaccgaggaatctccagcttctgacgaggccggagagaaggaggccaaaagcgacagcggctctgagacacctggaacaagcgagagcgccaccccggaatcctatgaacaacttgcaccacaaccgtgtgtgggagaaactttacattctagcctcccacgagacagtgaactgtttgtgcctgaagaggggagcagcgagaaggagagcgaggacgcgccaaaaacatctcctccgacgcctgggaaacatggtttggaacagactggggaggaaaaagtgatggtgactgttcctgacaaaaatccaccttgtccttgctgtggtacccgggtaaactctgtgttgaatctgattgaacatctgaaagtgtcacacgggaaaaggggggtttgttttcggtgtgcaaaatgtggaaaggaaaatagtaactatcacagtgttgtttgtcattttaagaaatgcaggggtccagagacggagaaagccccagctggggagtggatttgtgaggtatgcaacagagattttacaaccaaaattggcctgggacaacacaagagattggcacacccagcagtgagaaatcaggaaaggatcgttgcttcccaaccgaaagaaacatcaaatagaggtgctcacaaaaggtgctggacaaaggaggaggaagaattactaataagactggaggctcagttcgagggaaacaaaaatattaataagcttattgcagaacacataaccaccaaaacagctaagcagatcagtgacaaaaggcgattgctgtccagaaagccagcagaggagccacgtgaggagcctggaacgtgtcatcacaccaggagagcagctgcgagcctgagaacggagcctgagatgagtcatcacgcccaggcagaggacagagataatggacctgggagacgccctctgccaggcagggcagctgccggagggagaacaatggacgagataagacgccaccctgataagggcaacggacagcagagacccaccaagcaaaaatcagaagaacagctgcaggcttactataaaaagacactagaggaacgactttcagctggggcacttaacaccttcccccgagcattcaagcaggtaatggaaggccgggatataaagctagtaatcaatcagacagcgcaggactgcttcggatgcctggaatccataagccaaataagaacggcaacccgagataaaaaggacacggtgacccgggagaaacacccaaagaaaccttttcagaagtggatgaagaagagagcaatcaaaaaaggtaattatcttcggttccagcgtttattttatcttgatagagggaaactggctaaaatcattttagatgatattgaatgcttgtcttgtgacataccactcagtgaaatttattcggtttttaaaacaagatgggaaacaactggtagctttaaaagccttggggactttaaaacttacgggaaggctgacaacactgccttcagagaattaattacggctaaagaaattgagaaaaatgtgcaggaaatgagcaaaggctcggctcccggtccagacgggattactcttggggacgtcgtaaagatggatcccgagttttcccggaccatggagattttcaatttatggttaacaactggtaaaatcccggacatggtgagggggtgcagaaccgttttgattccaaaatcatcaaagccggatcgtttgaaagacattaataactggagacctatcacgatcggttccatcttgctgagactgttctccaggattgtaacagctaggctgagcaaagcgtgccccctgaacccaaggcaaagaggctttatcagagcggcgggatgctctgaaaacttaaaactcctgcaaactataatttggtcggccaaaagagaacacagaccactgggtgttgtattcgtggacatcgccaaggcttttgacaccgtaagccaccagcacatcattcatgctttgcagcaaagagaggtggatccccacatcgtcggtctggtgagcaatatgtacgagaacatcagtacgtatatcaccacaaagaggaacacacacacagacaaaatccagatccgggttggagtaaagcagggtgacccgatgtcgccccttttatttaacctggcaatggaccctctattatgcaagctggaagagagtggcaaaggataccaccgaggacagagcagcatcacagcgatggcatttgcagacgatctggttttgctgagcgactcctgggaaaatatgaatacaaatattagcatactggagaccttctgcaatctgaccggactcaaaacacaggggcaaaagtgccacggcttttacatcaagccgacaaaggactcttacaccatcaatgactgcgctgcctggactatcaacggcacacccctgaacatgatcgaccccggcgaatctgagaaatacctcggcctgcagtttgacccgtggattggaatagcaaggtccggtctctccacaaaactagatttttggcttcagcggatcgatcaagcaccacttaaacctctgcagaaaactgatattctcaaaacatacaccatccctcggctgatctacatagctgaccactcagaagtgaaaagcgcactactcgaaacccttgaccagaagatccggacagcggtcaaggaatggcttcacctacctccgtgcacctgcgatgccatcctgtactcgagcacgagagacggcggtttgggcatcaccaaattggcaggactgatccccagcgtgcaggcccgtagactgcatcggatcgcacagtcatctgacgatacgatgaaatgcttcatggaaaaagagaaaatggaacagctgcataagaaattgtggattcaagctggaggggacagagagaacataccctcgatttgggaagcaccaccgtcgagtgaaccaccaaacaacgtgagcacaaattcggaatgggaagcaccgacccagaaagataaatttccaaagccttgcaattggaggaaaaacgaattcaaaaaatggaccaaattggcatcccaaggccgcggaattgtaaattttgaaagagacaaaattagtaaccattggatccaatactacagacgcatacctcacaggaaactcctcactgcactacaactcaggctgaacgtttacggcacgagagaatttctagccaggggtagacaagaccaatacatcaaggcgtgtaggcactgcgatgcggacaacgaatcctgcgcccacatcatcggcaactgcccagtgacacaggacgcccgaatcaagaggcacaattacatctgcgaactgcttctcgaggaggcgaagaagaaggactgggtagtgttcaaggaaccgcacataagggattccaacaaggaactgtacaaacctgacctgatatttgtgaaggatgggcgtgcacttgtcgtggatgtgacagtacggtatgaagcagccaaatcatcgctggaggaagccgctgcagagaaagtgagaaagtacaaacacctggaaacggaagtaagacatctcacgaatgcaaaggacgttacttttgtgggctttcccctaggagcgcgggggaaatggcaccaagataactttaaacttttgactgagcttggcctctccaaatcgaggcaagtgaaaatggcagagactttttccacagtagcgctcttttcatctgtggacattgtacatatgtttgccagtagggccagaaaatctatggttatgtgataataggctgccttctgcggggcttgccttctggccatgcccttcttctctcccttgcacctgtacctcttggtctttgaataaagcctgagtaggaaggaccggtaaaaaaaaaaaaaaaaaaaaaaaaaaaaaaacgttgactaaaaaaaaaaaaaaaaaaaaaaaaaaaaaaaaaaaaaaaaaaaaaaaaaaaaaaaaaaaaaaaaaaaaaa

SEQ ID NO: 11978 - DNA, 5264 bp, synthetic construct
  source 1..5264: mol_type = other DNA
gaaataagagagaaaagaagagtaagaagaaatataagagaattcgccaccatggcccctaagaaaaagcggaaggtgaatatcagcggctctagctgcggcagccccaacagcgccgacaccagcagcgacttcaaggacctgtggaccaagctgaaggaatgccacgaccgggaagtgcagggactccaggtgaaggtcaccaaactcaagcaagaaagaatcctggacgcccagagactggaagaattcttcaccaagaaccagcagctgagagagcagcagaaagtgctgcacgagacaatcaaggttctggaagatagactgcgggccggcctgtgcgacagatgcgccgtgaccgaggaacacatgcgcaaaaagcagcaggagttcgagaacattagacagcaaaatctgaaattgatcacagagctgatgaacgagagaaacacactgcaggaggagaacaagaagctgagcgagcagctgcaacagaagatcgagaatgatcagcaacaccaggccgctgagctggaatgtgaagaggacgtgatccccgacagcccaatcacagctttcagcttttctggcgtgaacagactgaggcggaaggaaaacccccacgtgcggtacatcgagcagacccataccaagctggaacacagcgtgtgtgccaacgagatgagaaaggtgtccaagtcctccacccatccccagcacaaccctaacgaaaatgagatcctggtggctgatacctacgaccagtctcagagccctatggccaaggcccacggcaccagctcttatacccctgataagagctccttcaacctggccaccgtggtggccgagacactgggcctgggcgtgcaggaggaaagcgagacacagggcccaatgagccctctgggagatgagctgtaccactgcctggaaggcaaccacaagaaacagccttttgagtccggctccgagactcctggaacaagcgagagcgctacacctgagggcagccctaagagaaaggtgtccagcgccgagggcgctgccaaggaagagcctaaacggagaagcgccagactgagcgccaagccccccgccaaggtggaagccaagcctaagaaggccgccgctaaggacaagagcagcgataagaaagtccagaccaagggcaagcggggcgccaaaggcaaacaggccgaggtggccaaccaggagacaaaggaagatctgcctgctgagaacggcgaaaccaagaccgaggaatctccagcttctgacgaggccggagagaaggaggccaaaagcgacagcggctctgagacacctggaacaagcgagagcgccaccccggaatcctatgaacaacttgcaccacaaccgtgtgtgggagaaactttacattctagcctcccacgagacagtgaactgtttgtgcctgaagaggggagcagcgagaaggagagcgaggacgcgccaaaaacatctcctccgacgcctgggaaacatggtttggaacagactggggaggaaaaagtgatggtgactgttcctgacaaaaatccaccttgtccttgctgtggtacccgggtaaactctgtgttgaatctgattgaacatctgaaagtgtcacacgggaaaaggggggtttgttttcggtgtgcaaaatgtggaaaggaaaatagtaactatcacagtgttgtttgtcattttaagaaatgcaggggtccagagacggagaaagccccagctggggagtggatttgtgaggtatgcaacagagattttacaaccaaaattggcctgggacaacacaagagattggcacacccagcagtgagaaatcaggaaaggatcgttgcttcccaaccgaaagaaacatcaaatagaggtgctcacaaaaggtgctggacaaaggaggaggaagaattactaataagactggaggctcagttcgagggaaacaaaaatattaataagcttattgcagaacacataaccaccaaaacagctaagcagatcagtgacaaaaggcgattgctgtccagaaagccagcagaggagccacgtgaggagcctggaacgtgtcatcacaccaggagagcagctgcgagcctgagaacggagcctgagatgagtcatcacgcccaggcagaggacagagataatggacctgggagacgccctctgccaggcagggcagctgccggagggagaacaatggacgagataagacgccaccctgataagggcaacggacagcagagacccaccaagcaaaaatcagaagaacagctgcaggcttactataaaaagacactagaggaacgactttcagctggggcacttaacaccttcccccgagcattcaagcaggtaatggaaggccgggatataaagctagtaatcaatcagacagcgcaggactgcttcggatgcctggaatccataagccaaataagaacggcaacccgagataaaaaggacacggtgacccgggagaaacacccaaagaaaccttttcagaagtggatgaagaagagagcaatcaaaaaaggtaattatcttcggttccagcgtttattttatcttgatagagggaaactggctaaaatcattttagatgatattgaatgcttgtcttgtgacataccactcagtgaaatttattcggtttttaaaacaagatgggaaacaactggtagctttaaaagccttggggactttaaaacttacgggaaggctgacaacactgccttcagagaattaattacggctaaagaaattgagaaaaatgtgcaggaaatgagcaaaggctcggctcccggtccagacgggattactcttggggacgtcgtaaagatggatcccgagttttcccggaccatggagattttcaatttatggttaacaactggtaaaatcccggacatggtgagggggtgcagaaccgttttgattccaaaatcatcaaagccggatcgtttgaaagacattaataactggagacctatcacgatcggttccatcttgctgagactgttctccaggattgtaacagctaggctgagcaaagcgtgccccctgaacccaaggcaaagaggctttatcagagcggcgggatgctctgaaaacttaaaactcctgcaaactataatttggtcggccaaaagagaacacagaccactgggtgttgtattcgtggacatcgccaaggcttttgacaccgtaagccaccagcacatcattcatgctttgcagcaaagagaggtggatccccacatcgtcggtctggtgagcaatatgtacgagaacatcagtacgtatatcaccacaaagaggaacacacacacagacaaaatccagatccgggttggagtaaagcagggtgacccgatgtcgccccttttatttaacctggcaatggaccctctattatgcaagctggaagagagtggcaaaggataccaccgaggacagagcagcatcacagcgatggcatttgcagacgatctggttttgctgagcgactcctgggaaaatatgaatacaaatattagcatactggagaccttctgcaatctgaccggactcaaaacacaggggcaaaagtgccacggcttttacatcaagccgacaaaggactcttacaccatcaatgactgcgctgcctggactatcaacggcacacccctgaacatgatcgaccccggcgaatctgagaaatacctcggcctgcagtttgacccgtggattggaatagcaaggtccggtctctccacaaaactagatttttggcttcagcggatcgatcaagcaccacttaaacctctgcagaaaactgatattctcaaaacatacaccatccctcggctgatctacatagctgaccactcagaagtgaaaagcgcactactcgaaacccttgaccagaagatccggacagcggtcaaggaatggcttcacctacctccgtgcacctgcgatgccatcctgtactcgagcacgagagacggcggtttgggcatcaccaaattggcaggactgatccccagcgtgcaggcccgtagactgcatcggatcgcacagtcatctgacgatacgatgaaatgcttcatggaaaaagagaaaatggaacagctgcataagaaattgtggattcaagctggaggggacagagagaacataccctcgatttgggaagcaccaccgtcgagtgaaccaccaaacaacgtgagcacaaattcggaatgggaagcaccgacccagaaagataaatttccaaagccttgcaattggaggaaaaacgaattcaaaaaatggaccaaattggcatcccaaggccgcggaattgtaaattttgaaagagacaaaattagtaaccattggatccaatactacagacgcatacctcacaggaaactcctcactgcactacaactcagggccaacgtttacggcacgagagaatttctagccaggggtagacaagaccaatacatcaaggcgtgtaggcactgcgatgcggacaacgaatcctgcgcccacatcatcggcaactgcccagtgacacaggacgcccgaatcaagaggcacaattacatctgcgaactgcttctcgaggaggcgaagaagaaggactgggtagtgttcaaggaaccgcacataagggattccaacaaggaactgtacaaacctgacctgatatttgtgaaggatgggcgtgcacttgtcgtggatgtgacagtacggtatgaagcagccaaatcatcgctggaggaagccgctgcagagaaagtgagaaagtacaaacacctggaaacggaagtaagacatctcacgaatgcaaaggacgttacttttgtgggctttcccctaggagcgcgggggaaatggcaccaagataactttaaacttttgactgagcttggcctctccaaatcgaggcaagtgaaaatggcagagactttttccacagtagcgctcttttcatctgtggacattgtacatatgtttgccagtagggccagaaaatctatggttatgtgataataggctgccttctgcggggcttgccttctggccatgcccttcttctctcccttgcacctgtacctcttggtctttgaataaagcctgagtaggaaggaccggtaaaaaaaaaaaaaaaaaaaaaaaaaaaaaaacgttgactaaaaaaaaaaaaaaaaaaaaaaaaaaaaaaaaaaaaaaaaaaaaaaaaaaaaaaaaaaaaaaaaaaaaaa

SEQ ID NO: 11979-13019 - skipped (1041 entries)

SEQ ID NO: 13020 - DNA, 4278 bp, synthetic construct
  source 1..4278: mol_type = other DNA
gaaataagagagaaaagaagagtaagaagaaatataagagaattcgccaccatggcttattgcctgaaacctggccccccggtttcagacaggggcaaagagttcggaagtggactgaccacccaccccgaacccgagagcgaatctggtcatgacccaactgtcccaaatcctggtccgtctcttggagcgggggaaggtgcacagccactacccttactcagggtatcggtgggcacccaaacctgtgaagaggactttataacatctagaccaaccaaattacccggaattgaatcagaattaggcccgctggtgaagttttctttagaggtttacaggtcagatcttaagggggatgtgcaatttgaggggattcattttccagataattggggggtactggaggggtttcctgaggtgtacgaacaactggcaccacagccaaacgggggagacgagttaaatcatagtctcccaggggacagggagggggatgtacttgagaaggatagcagcgaaaaggagaaggaggctgcaccagaggcattgccctcagtgcaaagggcccgcagtgaacagttgccagataacatcgtaaaggtgactgttcccgacaaaaatccaccatgtccctgctgtggtgtccgcttaaactcagtgttagctctgattgaacatctgaagggctcacacgggaggaggagggtgtgctttaggtgtgccaaatgtgggagggagaattttaaccaccatagtactgtttgtcattacgcaaagtgcaaaggtccacagattgaaaggccaccagtgggagagtggatctgtgaggtatgcggaagggacttcacgaccaaaattggcctgggacaacacaaaagacatgcccatgcaatggtgagaaaccaggaaaggatcgatgcttcccaaccgaaagagacatcaaatcgaggagcccacaagaggctgtggacgaaggaggaggaagaactgctcatgaagttggaggtacagtttgagaatcacaaaaacatcaataagcttatcgcagagcaattaacaactaaaacagctaaacaaattagtgataaaaggagaatgctgctcaaaaaaggtagggggacaactggtaatttggaaacagagcctgggatgagtcatcaatcgcaggcaaaagttaaggacaatggactgggtggggactacctgccgggaggaccagttgtcgataagggatacatagggaagccaggacaacatcttgacacagataacagccatcaaataactgctggcaagaagaaagggggagggctgcaggctcgttatagaaggagaataatgaaacgattagcggccgggacaattaacatcttccccaaagtgtttaaagaactgattaacgaccaagaggcgagaccgctaatcaatcaaacaacagaggactactttggcctcttggactctgcatgccaaattagaacggcactccgggagaagggcaaatctcaggaggaacgaccaagaaaacagtatcagaagtggatgaagaagagagcgattaaaaggggggactatctccgcttccagcgattattccatctagacagggggaaactggcgagaattatcttggacaacactgagagcttgtcttgcgatatatcacccagtgaaatttattcggtattcaaggccagatgggaaacacctggacacttcaacggccttggggactttgaaattaaagggaaggccaacaacaaagccttcagggacttcatcacggctaaagaaattgaaaagaacgtgcgggaaatgagtaagggttcggcgccaggtccagatgggatcgcccttggggacatcaagaagatggatcccgggtattcccggaccgccgagctattcaacttgtggctgacagctggtgacatcccggacatggtgagggggtgcaggactgttttgatcccgaaatcgacgacaccggagcgcctaaaggacatcaacaactggagacccatcacgattggttccatcttgctaaggctgttctccaggatcataacggcgaggatgactaaggcgtgccccctcaacccgagacagagaggcttcatcagtgcgccgggatgctctgagaacctgaaactcctgcaatctataattcggactgccaaaaatgagcacaagccgctgggtgttattttcgtggacattgctaaggcttttgacaccgtgagccaccaacacatcatacacgttttacagcaacggagggttgacccccacattgttggactggtgaacaatatgtacaaggacatcagtacgtatgtcaccacaaagaagaacacacacacggacaaaatccagatccgggttggagtgaagcagggtgacccactatcaccccttctattcaacttggcaatggaccccctgttgtgtaagctggaagaaagtggcaaaggattccatcgaggacagagctcaataaccgcgatggcgttcgccgacgatctggtcttgttaagcgactcctgggagaacatgaaagagaacatcaaaatactggagaccttttgcaatctcaccggactcaaaacacagggtcagaagtgccacggcttttacatcaagcctacaaaggactcttacaccatcaacaactgccctgcatggaccatcaacggcacacccctgaacatgatcaaccccggggagtcagagaaatacctcggcctgcagatcgacccatggactggagtagcaaaatacgatctctccacaaaattgaaaatatggctcgaaaggattgaccgagctccacttaaacctctgcaaaaattagacatcctcaaaacatacaccattcctcgactgacctacctggctgaccattcagagatgaaagcaggggctctggaactgctcgaccagcagattcgaacagcggtcaaagactggctgcacctgccctcgtgcacctgtgatgccatcttgtacgtgagcacgagggacggcggtttgggtgttaccaagttggcgggactgattccaagtgtgcaagcccggaggctgcatcgcattgcgcagtcgccggacgagacgatgaaggacttcctagagaaggcgcagatggagaagatgtatgagaagttatgggttcaagctggaggcaaaaagaaggacatgccgtcaatttgggaggccctaccgatgactgtaccacccactaatacaggtaatctttcggagtgggaagcaccgaaccccaaaagtaagtacccaaaaccttgtgattggagaaggaaagagttcaaaaagtggacaaaattggagtcccaaggtcgtggagtcaaaaattttaggaatgatacaattagtaacgattggatccaatattatagaggcatacctcacaggaaactcctcactgccatacaactcagggccaatgtataccccacaagggaatttctcgcgcgggggaggggtgataaccaggttaagttttgtaggcactgtgaagcggaccttgaaacctgtggccatatcatcggcttttgcccagtaacgaaggacgcccgaatcaagaggcacaatcgcatatgcgacaggctttgcgaggaggcagctaagagggaatgggtggtgttcaaggagccgcacttgagggatgccaccacggaactgtttaaaccggatgtgatattcgtgaaagagggccgtgcactggttgtggatgtgacagtacgatatgaatcagccaagacaacgctggaggcagctgctatggagaaagtggacaagtacaaacatctggaggcagaagtgaaggaactcaccaacgcaaaggacgttgtttttatggggttcccccttggagcgcgagggaaattctacaaagggaactttaacttgctagagactcttggcctcccaaaaacgaggcaattgagtgtggcaaagactctatccacgtacgcgctcatgtcatctgtggacattgtgcatatgtttgccagtagatctaggaaaccaaatgtctgataataggctgccttctgcggggcttgccttctggccatgcccttcttctctcccttgcacctgtacctcttggtctttgaataaagcctgagtaggaaggaccggtaaaaaaaaaaaaaaaaaaaaaaaaaaaaaaacgttgactaaaaaaaaaaaaaaaaaaaaaaaaaaaaaaaaaaaaaaaaaaaaaaaaaaaaaaaaaaaaaaaaaaaaaaaaaa

SEQ ID NO: 13021-13023 - skipped (3 entries)

SEQ ID NO: 13024 - DNA, 4185 bp, synthetic construct
  source 1..4185: mol_type = other DNA
gaaataagagagaaaagaagagtaagaagaaatataagagaattcgccaccatggccaaacggacagccgacggaagcgagttcgagtcaccaaagaagaagcggaaagtctctggcggctcatctaccaaccccaagcctcagaaaaagaacaagcggaacaccaatagacggcctcaagacgtgaagttccccggcggcggacagatcgtgggcggagtctacctgctgcctcgcagaggcccaagactgggcgtgcgggccacaagaaagaccagcgagcggagccagcctagaagcggctctgagacacctggaacaagcgagagcgccaccccggaatccctgttcgttccggaagagggctctagcgagaaggagagcgaggacgctcctaagaccagccctcctacccctggcaaacacggcctggagcaaacaggcgaggagaaggtcatggtgaccgtgcccgacaagaaccctccctgtccttgctgtggcacaagagtcaacagcgtgctgaacctcatcgagcacctgaaggtgtcccacggcaagagaggcgtgtgcttcagatgcgccaagtgcggcaaggagaacagcaactaccacagcgtcgtgtgccacttcaagaagtgcagaggccctgagaccgagaaggctcccgctggcgaatggatttgcgaggtgtgcaacagagacttcaccaccaagatcggcctgggccagcacaagcggttagctcaccctgctgtgagaaaccaggagagaatcgtggccagccagcccaaggagacaagcaacaggggcgctcacaagagatgctggaccaaggaggaagaggagctgctcatcagactggaggctcagttcgagggcaacaagaacatcaataagcttatcgccgagcacatcaccacaaagaccgccaagcagatcagcgacaagaggagactgctgtccagaaagcccgccgaggagcctagagaggaacctggtacatgtcaccacaccagaagagccgccgctagcctgagaaccgagcccgaaatgtctcaccacgctcaggccgaggacagagacaacggccctggcaggagacctcttcccggcagagctgctgctggaggcagaaccatggacgagatcaggagacaccccgataagggcaacggccagcagagacccacaaagcagaagtccgaggaacagctccaggcctactacaagaaaaccctggaggagagactgtccgcgggagctctgaacaccttccctagagccttcaaacaagtcatggagggcagagacatcaagctggtgatcaaccagaccgcccaggactgcttcggctgccttgagtctatcagccagatcaggaccgccacacgggataagaaggacaccgtcaccagagagaagcaccccaagaagcccttccagaaatggatgaagaagagggccatcaagaagggcaattacctgagattccagaggctgttctacctggacagaggcaagctggccaagatcatcctggacgacatcgagtgcctgagctgcgacatccctctgagcgagatctacagcgtgttcaagaccagatgggagaccaccggcagcttcaagtctctgggcgacttcaagacatacggcaaggccgacaacaccgccttcagagagctcatcaccgctaaggagatcgagaagaacgtgcaggagatgagcaagggcagcgctcctggccccgatggaattacactgggcgatgtggtgaagatggaccccgagttcagcagaacaatggagatcttcaacctgtggctcaccacaggcaagatccccgacatggtgagaggctgcagaaccgtgcttatccccaagagcagcaagcccgacagactgaaggatatcaacaactggagacccatcaccatcggcagcatcctgctgcggctgttcagccggattgtgaccgctagactgagcaaagcctgtcccctgaaccccagacagagaggcttcatcagagccgctggctgcagcgagaacctgaagctgctccagacaatcatctggagcgccaagagagagcacagacccctgggcgttgttttcgtggacatcgccaaggccttcgacaccgtgtcccatcagcacattatccacgccctgcagcagagggaggtcgaccctcatattgtgggcctggtgtccaacatgtacgagaacatctccacctatattacgaccaagagaaacacccacacagacaagatccagatccgggtcggcgtcaagcagggcgatcctatgtctcctctgctgttcaacctcgccatggaccctctgctctgcaagctcgaggagtctggaaagggctaccatagaggccaatcatcgatcaccgccatggccttcgccgacgacctggtgcttttaagcgacagctgggagaacatgaacaccaacatctctatcctggagacattctgcaaccttaccggcctgaaaacccagggccagaagtgtcatggcttctacatcaaacccaccaaggacagctacaccatcaacgactgcgccgcctggacaatcaacggcacccctctcaacatgatcgaccccggcgagtctgagaagtacctgggcctgcagttcgatccctggatcggcatcgctagaagcggcttgagcaccaagctggacttttggctccaacgcatagaccaggcccccctgaagcctcttcagaaaaccgacattttgaaaacttatacgatccccagactcatctacatcgccgaccactccgaggtcaagagcgctctgctggaaaccctggaccagaaaatcagaaccgccgtcaaggaatggctgcacctgcccccttgcacatgcgacgctatcctgtacagcagcaccagggacggcggcttaggaatcaccaagttagccggcctcatccccagcgtgcaggctaggagactccacagaatcgcccagagcagcgacgacaccatgaagtgcttcatggagaaggaaaagatggagcagctgcacaagaagctgtggatccaagcgggcggagatcgtgagaacattcccagcatctgggaggcccctcccagctcagaacctcccaataacgtgtccaccaattctgaatgggaggctcccacccagaaggataagtttcccaagccctgcaactggcggaagaacgagttcaaaaaatggacaaagctggctagccagggcaggggcatcgtgaacttcgaaagggacaagattagcaaccactggatccagtactacagaagaatcccccacagaaagctcctcaccgccctccagttacgtgcaaacgtgtacccaaccagagaattcctggccagaggcagacaggaccagtacatcaaggcctgccggcactgcgatgccgataacgagagctgtgctcacatcatcggcaactgccccgtcacccaggacgccagaatcaagagacacaactacatctgcgagttacttctggaggaagccaagaagaaggattgggttgtgttcaaggagccccacatcagagactccaacaaggagctgtacaagccagacctcatcttcgtgaaggacgctagagccctggtggtggacgtcaccgtcagatacgaggctgctaagtccagccttgaggaggctgccgccgagaaagtgcggaagtacaagcacctggaaacagaggtcagacacctcaccaacgccaaggacgttaccttcgtgggcttccccctaggtgctagaggcaaatggcaccaggacaacttcaagctgcttaccgagctgggcctctccaagagccgacaggttaagatggccgagaccttcagcaccgtcgccctgttctcttctgtggacattgtgcacatgttcgcctccagagccagaaagagcatggtgatgtgataataggctgccttctgcggggcttgccttctggccatgcccttcttctctcccttgcacctgtacctcttggtctttgaataaagcctgagtaggaaggaccggtaaaaaaaaaaaaaaaaaaaaaaaaaaaaaaacgttgactaaaaaaaaaaaaaaaaaaaaaaaaaaaaaaaaaaaaaaaaaaaaaaaaaaaaaaaaaaaaaaaaaaaaaaaaaa

SEQ ID NO: 13025-13026 - skipped (2 entries)

SEQ ID NO: 13027 - DNA, 4643 bp, synthetic construct
  source 1..4643: mol_type = other DNA
gaaataagagagaaaagaagagtaagaagaaatataagagaattcgccaccatggcttcttgcccgaaacctggccccccggtttcagcaggggcaatgagtttggaaagtggactgaccacccactccgttctcgccatcgaacgtggtcccaattcgttggcaaattccggatcagactttgggggggggggtctggggctaccgttacgcctattgagggtatcggtcggcactcagacctcccgctccgactgggtagacctggtgtcctggagccacccaggacccacgtctaagtcccagcaggttgacctggtgtctttatttcctaaacaccgggttgacctgttatccaaaaacgaccaggtagacctggtggctcaatttttaccatctaaatttccccccaatttggcagaaaatgatttggctttgctggtgaacttagagttctacagatcggatttgcatgtgtatgagtgtgttcataaggctgcacattgggagggattaagtggtttgcctgaggtgtatgaacaacttgcaccacaaccgtgtgtgggagaaactttacattctagcctcccacgagacagtgaactgtttgtgcctgaagaggggagcagcgagaaggagagcgaggacgcgccaaaaacatctcctccgacgcctgggaaacatggtttggaacagactggggaggaaaaagtgatggtgactgttcctgacaaaaatccaccttgtccttgctgtggtacccgggtaaactctgtgttgaatctgattgaacatctgaaagtgtcacacgggaaaaggggggtttgttttcggtgtgcaaaatgtggaaaggaaaatagtaactatcacagtgttgtttgtcattttaagaaatgcaggggtccagagacggagaaagccccagctggggagtggatttgtgaggtatgcaacagagattttacaaccaaaattggcctgggacaacacaagagattggcacacccagcagtgagaaatcaggaaaggatcgttgcttcccaaccgaaagaaacatcaaatagaggtgctcacaaaaggtgctggacaaaggaggaggaagaattactaataagactggaggctcagttcgagggaaacaaaaatattaataagcttattgcagaacacataaccaccaaaacagctaagcagatcagtgacaaaaggcgattgctgtccagaaagccagcagaggagccacgtatggagcctggaacgtgtcatcacaccaggagagcagctgcgagcctgagaacggagcctgagatgagtcatcacgcccaggcagaggacagagataatggacctgggagacgccctctgccaggcagggcagctgccggagggagaacaatggacgagataagacgccaccctgataaggccaacgatcagcaggaggccagtagcagtgggaggggcccagtgaccaggagagcagctgcaggaaagaaaacaaaaaagagtattgatcaccctactgataaggccaacggccagcaggtagccatcagcactagaaggggttgtttgaatagaggagtgactgccggggtagaaacaatagagggctcgagtcacctccctgataaggacagtgacggacagggcacccccagccgggagaaggagggacaattacaagatcactatcaagaagtcatcggagcctggttatcagatgggaggatcaatacctttccagaggcattcaaagggttgttagggaaacgagagatacaggcaacgatcaatcagtcaatactggattgttttgggggcattgattcaaaaagccaggtgaacaaaatgactcgagataagaaagataaaaagccagggagacctccccagaagtggatgaaaaagagagccatcaaaagaggtagctatcttcgcttccaacgtcttttccatcttgataggggaaaattagccaagattgttttggacaatatcgaatgtttgacgtgcgatatcccacccagtgaaatttattccgtttttaaggccaggtgggaaacagcaggcaaatttaccagtcttggggactttaaatttactgaaaaggtggacaatagtgcattcagggatttaattacagctaaggaagtagaaaagaacatgcaagaaatgagcaaaggctcggctcctggtccagatggaattactctgagagacattcaaaaaatggatcctaagctctccaggaccacagagattttcaacctttggttggctgcaggcaaaattccggatggggtgagggaatgcaggactgtcttaattccaaaatcaacaaaaccagaacgcttaaaggacattaacaattggagaccaattacaatcggatccaccttgcttagattattttccaggattttaacagccagactaagcaaggcatgccccctcaacccaagacagaagggcttcattcaagcagccggatgctcagaaaacctgcaactcctgcaatccataatttggtcagcaaaacgggaacacaggcccctgggtgtcgtatttgtggacatcgcaaaggcttttgacacagtaagccacaagcacattctacacgttctgcagcggaggggagtggatcctcacatcatcggcctggtgagtgatatgtatgaaaacattcatacttctatcaccacgaagaaagcacgtacggatcgcatccagatccgagttggagttaaacagggcgacccgatgtctccccttctattcaatctggcaatggaccccctgctgtgcgaactggaaacgaacggcaggggacaccaccgcggcacaaattgcatcacagccatggcgtttgctgacgacctggtcctactgagtgactcctgggaggacatgaagagcaacatcaagatattggaggccttctgcgatctcaccggcctcaaaacgcagggagagaagtgccacggcttttacatcaagccgacgaaggactcgtacacggtcaacgactgtgctgcttggactataaacggcactcccctgaacatgattcttcccggtgagtccgagaaatacctgggcctgcagatagacccatggactggattggcaaaatcggacctctctacaaaactcgactcatggctcgagcaaatcgatagagttccactcaaaccgctgcagaaaattgaactcctgaaaacatacaccatccctcggttgacatacgtggctgaccattcggacttgaaagttagtttcctggagacattggatcagaagattcggacaatagttaaagattggctacacctgcctgcatgtacctgcgatgccatcctatactctagcacgaaggatggcggcctgggcatcactaaattagcaaagctgattcctagcgtacaggctaggagactacacagaatagcccaatcatcggacgaaaccatgaagcaatttctccacagggacaagatggaagcaatgtaccagaaactgtggattcaagctggaggggacagagagaacataccctcgatttgggaagcaccaccgtcgagtgaaccaccaaacaacgtgagcacaaattcggaatgggaagcaccgacccagaaagataaatttccaaagccttgcaattggaggaaaaacgaattcaaaaaatggaccaaattggcatcccaaggccgcggaattgtaaattttgaaagagacaaaattagtaaccattggatccaatactacagacgcatacctcacaggaaactcctcactgcactacaactcagggccaacgtttaccccacgagagaatttctagccaggggtagacaagaccaatacatcaaggcgtgtaggcactgcgatgcggacaacgaatcctgcgcccacatcatcggcaactgcccagtgacacaggacgcccgaatcaagaggcacaattacatctgcgaactgcttctcgaggaggcgaagaagaaggactgggtagtgttcaaggaaccgcacataagggattccaacaaggaactgtacaaacctgacctgatatttgtgaaggatgggcgtgcacttgtcgtggatgtgacagtacggtatgaagcagccaaatcatcgctggaggaagccgctgcagagaaagtgagaaagtacaaacacctggaaacggaagtaagacatctcacgaatgcaaaggacgttacttttgtgggctttcccctaggagcgcgggggaaatggcaccaagataactttaaacttttgactgagcttggcctctccaaatcgaggcaagtgaaaatggcagagactttttccacagtagcgctcttttcatctgtggacattgtacatatgtttgccagtagggccagaaaatctatggttatgtgataataggctgccttctgcggggcttgccttctggccatgcccttcttctctcccttgcacctgtacctcttggtctttgaataaagcctgagtaggaaggaccggtaaaaaaaaaaaaaaaaaaaaaaaaaaaaaaacgttgactaaaaaaaaaaaaaaaaaaaaaaaaaaaaaaaaaaaaaaaaaaaaaaaaaaaaaaaaaaaaaaaaaaaaaaaaaaaagtcttc

SEQ ID NO: 13028 - DNA, 4560 bp, synthetic construct
  source 1..4560: mol_type = other DNA
gaaataagagagaaaagaagagtaagaagaaatataagagaattcgccaccatggcccctaagaaaaagcggaaggtggtgaccgtgaagttcaagtacaagggcgaggaaaaggaagtggacatcagcaagatcaagaaggtctggcgggtgggcaagatgatcagctttacctacgacgataacggcaagacaggcagaggcgccgtgtccgagaaggacgcccctaaagagctgctgcagatgctggaaaaatccggctccgagactcctggaacaagcgagagcgctacacctgagggcagccctaagagaaaggtgtccagcgccgagggcgctgccaaggaagagcctaaacggagaagcgccagactgagcgccaagccccccgccaaggtggaagccaagcctaagaaggccgccgctaaggacaagagcagcgataagaaagtccagaccaagggcaagcggggcgccaaaggcaaacaggccgaggtggccaaccaggagacaaaggaagatctgcctgctgagaacggcgaaaccaagaccgaggaatctccagcttctgacgaggccggagagaaggaggccaaaagcgacagcggctctgagacacctggaacaagcgagagcgccaccccggaatcctacgaacagctggctccccagccctgtgtaggcgagacattacacagcagcctgcccagagacagcgagctgttcgttccggaagagggctctagcgagaaggagagcgaggacgctcctaagaccagccctcctacccctggcaaacacggcctggagcaaacaggcgaggagaaggtcatggtgaccgtgcccgacaagaaccctccctgtccttgctgtggcacaagagtcaacagcgtgctgaacctcatcgagcacctgaaggtgtcccacggcaagagaggcgtgtgcttcagatgcgccaagtgcggcaaggagaacagcaactaccacagcgtcgtgtgccacttcaagaagtgcagaggccctgagaccgagaaggctcccgctggcgaatggatttgcgaggtgtgcaacagagacttcaccaccaagatcggcctgggccagcacaagcggttagctcaccctgctgtgagaaaccaggagagaatcgtggccagccagcccaaggagacaagcaacaggggcgctcacaagagatgctggaccaaggaggaagaggagctgctcatcagactggaggctcagttcgagggcaacaagaacatcaataagcttatcgccgagcacatcaccacaaagaccgccaagcagatcagcgacaagaggagactgctgtccagaaagcccgccgaggagcctagagaggaacctggtacatgtcaccacaccagaagagccgccgctagcctgagaaccgagcccgaaatgtctcaccacgctcaggccgaggacagagacaacggccctggcaggagacctcttcccggcagagctgctgctggaggcagaaccatggacgagatcaggagacaccccgataagggcaacggccagcagagacccacaaagcagaagtccgaggaacagctccaggcctactacaagaaaaccctggaggagagactgtccgcgggagctctgaacaccttccctagagccttcaaacaagtcatggagggcagagacatcaagctggtgatcaaccagaccgcccaggactgcttcggctgccttgagtctatcagccagatcaggaccgccacacgggataagaaggacaccgtcaccagagagaagcaccccaagaagcccttccagaaatggatgaagaagagggccatcaagaagggcaattacctgagattccagaggctgttctacctggacagaggcaagctggccaagatcatcctggacgacatcgagtgcctgagctgcgacatccctctgagcgagatctacagcgtgttcaagaccagatgggagaccaccggcagcttcaagtctctgggcgacttcaagacatacggcaaggccgacaacaccgccttcagagagctcatcaccgctaaggagatcgagaagaacgtgcaggagatgagcaagggcagcgctcctggccccgatggaattacactgggcgatgtggtgaagatggaccccgagttcagcagaacaatggagatcttcaacctgtggctcaccacaggcaagatccccgacatggtgagaggctgcagaaccgtgcttatccccaagagcagcaagcccgacagactgaaggatatcaacaactggagacccatcaccatcggcagcatcctgctgcggctgttcagccggattgtgaccgctagactgagcaaagcctgtcccctgaaccccagacagagaggcttcatcagagccgctggctgcagcgagaacctgaagctgctccagacaatcatctggagcgccaagagagagcacagacccctgggcgttgttttcgtggacatcgccaaggccttcgacaccgtgtcccatcagcacattatccacgccctgcagcagagggaggtcgaccctcatattgtgggcctggtgtccaacatgtacgagaacatctccacctatattacgaccaagagaaacacccacacagacaagatccagatccgggtcggcgtcaagcagggcgatcctatgtctcctctgctgttcaacctcgccatggaccctctgctctgcaagctcgaggagtctggaaagggctaccatagaggccaatcatcgatcaccgccatggccttcgccgacgacctggtgcttttaagcgacagctgggagaacatgaacaccaacatctctatcctggagacattctgcaaccttaccggcctgaaaacccagggccagaagtgtcatggcttctacatcaaacccaccaagaagagctacaccatcaacgactgcgccgcctggacaatcaacggcacccctctcaacatgatcgaccccggcgagtctgagaagtacctgggcctgcagttcgatccctggatcggcatcgctagaagcggcttgagcaccaagctggacttttggctccaacgcatagaccaggcccccctgaagcctcttcagaaaaccgacattttgaaaacttatacgatccccagactcatctacatcgccgaccactccgaggtcaagagcgctctgctggaaaccctggaccagaaaatcagaaccgccgtcaaggaatggctgcacctgcccccttgcacatgcgacgctatcctgtacagcagcaccagggacggcggcttaggaatcaccaagttagccggcctcatccccagcgtgcaggctaggagactccacagaatcgcccagagcagcgacgacaccatgaagtgcttcatggagaaggaaaagatggagcagctgcacaagaagctgtggatccaagcgggcggagatcgtgagaacattcccagcatctgggaggcccctcccagctcagaacctcccaataacgtgtccaccaattctgaatgggaggctcccacccagaaggataagtttcccaagccctgcaactggcggaagaacgagttcaaaaaatggacaaagctggctagccagggcaggggcatcgtgaacttcgaaagggacaagattagcaaccactggatccagtactacagaagaatcccccacagaaagctcctcaccgccctccagttacgtgcaaacgtgtacccaaccagagaattcctggccagaggcagacaggaccagtacatcaaggcctgccggcactgcgatgccgataacgagagctgtgctcacatcatcggcaactgccccgtcacccaggacgccagaatcaagagacacaactacatctgcgagttacttctggaggaagccaagaagaaggattgggttgtgttcaaggagccccacatcagagactccaacaaggagctgtacaagccagacctcatcttcgtgaaggacggcagagccctggtggtggacgtcaccgtcagatacgaggctgctaagtccagccttgaggaggctgccgccgagaaagtgcggaagtacaagcacctggaaacagaggtcagacacctcaccaacgccaaggacgttaccttcgtgggcttccccctaggtgctagaggcaaatggcaccaggacaacttcaagctgcttaccgagctgggcctctccaagagccgacaggttaagatggccgagaccttcagcaccgtcgccctgttctcttctgtggacattgtgcacatgttcgcctccagagccagaaagagcatggtgatgtgataataggctgccttctgcggggcttgccttctggccatgcccttcttctctcccttgcacctgtacctcttggtctttgaataaagcctgagtaggaaggaccggtaaaaaaaaaaaaaaaaaaaaaaaaaaaaaaacgttgactaaaaaaaaaaaaaaaaaaaaaaaaaaaaaaaaaaaaaaaaaaaaaaaaaaaaaaaaaaaaaaaaaaaaaaaaaa

SEQ ID NO: 13029 - DNA, 5826 bp, synthetic construct
  source 1..5826: mol_type = other DNA
gaaataagagagaaaagaagagtaagaagaaatataagagaattcgccaccatggcccctaagaaaaagcggaaggtgagcgccagccaggacagcagaagccgggacaacggccctgacggaatggagcctgagggagtgatcgaatccaactggaacgagatcgtggacagcttcgacgacatgaacctgagcgagagcctgctgagaggcatctacgcttacggcttcgagaagcctagcgccatccagcaaagagcaatcctgccatgcatcaagggctacgacgtcatcgcccaggcccagagcggcaccggcaaaaccgccaccttcgccatctctatcctgcagcagatcgagctggatctgaaagccacacaagcgttggtgctggcccccacaagagagctggcccagcagatccagaaggtggtgatggctctgggcgactacatgggcgcctcttgtcatgcctgcatcggcggcaccaatgtgcgggctgaagtgcagaagctccagatggaagctccccacatcattgtgggaacaccaggcagggtgttcgatatgctgaatcgccggtacctgtctcctaagtatatcaagatgttcgtgctggacgaggccgacgaaatgctgtctagaggtttcaaggaccagatctacgacatttttcagaaactgaacagcaacacccaggttgtgctgctgtcagccaccatgcctagcgatgtgctcgaggtgaccaagaagttcatgcgggaccctatcagaatcctggtgaagaaagaggagctgactctggagggcatcagacagttctacatcaacgtggaaagagaggaatggaagctggacaccctgtgcgacctgtatgagacactgaccatcacccaggccgtgatctttatcaataccagaagaaaggtcgactggctgacagagaagatgcacgcccgggacttcaccgtgtccgccatgcacggcgatatggaccaaaaggaacgggatgtgattatgagagagttccggtccggcagcagccgggtgctgatcacaacagatctgctggctagaggaatcgatgtgcagcaggtgagcctggtcatcaactacgatctgcctaccaacagagaaaattacatccacagaatcggcagaggcggaagattcggcagaaagggcgtggccataaacatggtgacagaggaagataagcggacccttagagacatcgaaaccttttacaacaccagcatcgaggaaatgcccctgaacgtggccgacctgatctccggctccgagactcctggaacaagcgagagcgctacacctgagggcagcgtgaccgtgaagttcaagtacaagggcgaggaaaaggaagtggacatcagcaagatcaagaaggtctggcgggtgggcaagatgatcagctttacctacgacgataacggcaagacaggcagaggcgccgtgtccgagaaggacgcccctaaagagctgctgcagatgctggaaaaatccggctccgagactcctggaacaagcgagagcgctacacctgagggcagccctaagagaaaggtgtccagcgccgagggcgctgccaaggaagagcctaaacggagaagcgccagactgagcgccaagccccccgccaaggtggaagccaagcctaagaaggccgccgctaaggacaagagcagcgataagaaagtccagaccaagggcaagcggggcgccaaaggcaaacaggccgaggtggccaaccaggagacaaaggaagatctgcctgctgagaacggcgaaaccaagaccgaggaatctccagcttctgacgaggccggagagaaggaggccaaaagcgacagcggctctgagacacctggaacaagcgagagcgccaccccggaatcctacgaacagctggctccccagccctgtgtaggcgagacattacacagcagcctgcccagagacagcgagctgttcgttccggaagagggctctagcgagaaggagagcgaggacgctcctaagaccagccctcctacccctggcaaacacggcctggagcaaacaggcgaggagaaggtcatggtgaccgtgcccgacaagaaccctccctgtccttgctgtggcacaagagtcaacagcgtgctgaacctcatcgagcacctgaaggtgtcccacggcaagagaggcgtgtgcttcagatgcgccaagtgcggcaaggagaacagcaactaccacagcgtcgtgtgccacttcaagaagtgcagaggccctgagaccgagaaggctcccgctggcgaatggatttgcgaggtgtgcaacagagacttcaccaccaagatcggcctgggccagcacaagcggttagctcaccctgctgtgagaaaccaggagagaatcgtggccagccagcccaaggagacaagcaacaggggcgctcacaagagatgctggaccaaggaggaagaggagctgctcatcagactggaggctcagttcgagggcaacaagaacatcaataagcttatcgccgagcacatcaccacaaagaccgccaagcagatcagcgacaagaggagactgctgtccagaaagcccgccgaggagcctagaatggaacctggtacatgtcaccacaccagaagagccgccgctagcctgagaaccgagcccgaaatgtctcaccacgctcaggccgaggacagagacaacggccctggcaggagacctcttcccggcagagctgctgctggaggcagaaccatggacgagatcaggagacaccccgataagggcaacggccagcagagacccacaaagcagaagtccgaggaacagctccaggcctactacaagaaaaccctggaggagagactgtccgcgggagctctgaacaccttccctagagccttcaaacaagtcatggagggcagagacatcaagctggtgatcaaccagaccgcccaggactgcttcggctgccttgagtctatcagccagatcaggaccgccacacgggataagaaggacaccgtcaccagagagaagcaccccaagaagcccttccagaaatggatgaagaagagggccatcaagaagggcaattacctgagattccagaggctgttctacctggacagaggcaagctggccaagatcatcctggacgacatcgagtgcctgagctgcgacatccctctgagcgagatctacagcgtgttcaagaccagatgggagaccaccggcagcttcaagtctctgggcgacttcaagacatacggcaaggccgacaacaccgccttcagagagctcatcaccgctaaggagatcgagaagaacgtgcaggagatgagcaagggcagcgctcctggccccgatggaattacactgggcgatgtggtgaagatggaccccgagttcagcagaacaatggagatcttcaacctgtggctcaccacaggcaagatccccgacatggtgagaggctgcagaaccgtgcttatccccaagagcagcaagcccgacagactgaaggatatcaacaactggagacccatcaccatcggcagcatcctgctgcggctgttcagccggattgtgaccgctagactgagcaaagcctgtcccctgaaccccagacagagaggcttcatcagagccgctggctgcagcgagaacctgaagctgctccagacaatcatctggagcgccaagagagagcacagacccctgggcgttgttttcgtggacatcgccaaggccttcgacaccgtgtcccatcagcacattatccacgccctgcagcagagggaggtcgaccctcatattgtgggcctggtgtccaacatgtacgagaacatctccacctatattacgaccaagagaaacacccacacagacaagatccagatccgggtcggcgtcaagcagggcgatcctatgtctcctctgctgttcaacctcgccatggaccctctgctctgcaagctcgaggagtctggaaagggctaccatagaggccaatcatcgatcaccgccatggccttcgccgacgacctggtgcttttaagcgacagctgggagaacatgaacaccaacatctctatcctggagacattctgcaaccttaccggcctgaaaacccagggccagaagtgtcatggcttctacatcaaacccaccaagaagagctacaccatcaacgactgcgccgcctggacaatcaacggcacccctctcaacatgatcgaccccggcgagtctgagaagtacctgggcctgcagttcgatccctggatcggcatcgctagaagcggcttgagcaccaagctggacttttggctccaacgcatagaccaggcccccctgaagcctcttcagaaactggacattttgaaaacttatacgatccccagactcatctacatcgccgaccactccgaggtcaagagcgctctgctggaaaccctggaccagaaaatcagaaccgccgtcaaggaatggctgcacctgcccccttgcacatgcgacgctatcctgtacagcagcaccagggacggcggcttaggaatcaccaagttagccggcctcatccccagcgtgcaggctaggagactccacagaatcgcccagagcagcgacgacaccatgaagtgcttcatggagaaggaaaagatggagcagctgcacaagaagctgtggatccaagcgggcggagatcgtgagaacattcccagcatctgggaggcccctcccagctcagaacctcccaataacgtgtccaccaattctgaatgggaggctcccacccagaaggataagtttcccaagccctgcaactggcggaagaacgagttcaaaaaatggacaaagctggctagccagggcaggggcatcgtgaacttcgaaagggacaagattagcaaccactggatccagtactacagaagaatcccccacagaaagctcctcaccgccctccagttacgtgcaaacgtgtacccaaccagagaattcctggccagaggcagacaggaccagtacatcaaggcctgccggcactgcgatgccgataacgagagctgtgctcacatcatcggcaactgccccgtcacccaggacgccagaatcaagagacacaactacatctgcgagttacttctggaggaagccaagaagaaggattgggttgtgttcaaggagccccacatcagagactccaacaaggagctgtacaagccagacctcatcttcgtgaaggacggcagagccctggtggtggacgtcaccgtcagatacgaggctgctaagtccagccttgaggaggctgccgccgagaaagtgcggaagtacaagcacctggaaacagaggtcagacacctcaccaacgccaaggacgttaccttcgtgggcttccccctaggtgctagaggcaaatggcaccaggacaacttcaagctgcttaccgagctgggcctctccaagagccgacaggttaagatggccgagaccttcagcaccgtcgccctgttctcttctgtggacattgtgcacatgttcgcctccagagccagaaagagcatggtgatgtgataataggctgccttctgcggggcttgccttctggccatgcccttcttctctcccttgcacctgtacctcttggtctttgaataaagcctgagtaggaaggaccggtaaaaaaaaaaaaaaaaaaaaaaaaaaaaaaacgttgactaaaaaaaaaaaaaaaaaaaaaaaaaaaaaaaaaaaaaaaaaaaaaaaaaaaaaaaaaaaaaaaaaaaaaaaaaa

SEQ ID NO: 13030-20499 - skipped (7470 entries)

SEQ ID NO: 20500 - DNA, 321 bp, Aphelocoma californica
  source 1..321: mol_type = genomic DNA
gagggcgttgttactaactgggcatagctgcagaggtcgcacctcctcgtggtcccgccggatacccgtaagggtaactaagtcgacctctgccccagtgtgagtgagggggaaatatctcccctccctattgctggactcgccacccagtggtagattcacgaaacgcagaaacaaatttattggcgcagctcttcgctgttgcccaaagccttgtccacgggcattagttggacacagtctgcagattggttgggggttccacctgcagactttgacaacccctttctgatttgaccaaacgccatcttggtctcgacc

SEQ ID NO: 20501 - DNA, 187 bp, Agelaius tricolor; identical to SEQ ID NO: 1358
  source 1..187: mol_type = genomic DNA

SEQ ID NO: 20502 - DNA, 205 bp, Ammodramus caudacutus; identical to SEQ ID NO: 1365
  source 1..205: mol_type = genomic DNA

SEQ ID NO: 20503 - DNA, 314 bp, Geothlypis trichasfixed
  source 1..314: mol_type = genomic DNA
ggcggcttttgagagtatagttacgaactgggcatcgctgcagagatcgcacctcctcgtggtcccgctggataccctgcatagggtaacgaagccgatctctgccccagacaaggtctcgttggaatcaccagccaacgaggacctccgaattggtgaaacaaatttcaggtaggagccgcgcggcttttttacctaagaccttgcccacgggtgtttgcagctgggcaaagaccggcaagcggtttgaggggtgccgctgccgatctcaatccttccccaccaaaaactgtctttcctagccagatccgaca

SEQ ID NO: 20504 - DNA, 221 bp, Ammospiza nelsoni; identical to SEQ ID NO: 1355
  source 1..221: mol_type = genomic DNA

SEQ ID NO: 20505 - DNA, 192 bp, Lichenostomus cassidix; identical to SEQ ID NO: 1363
  source 1..192: mol_type = genomic DNA

SEQ ID NO: 20506 - DNA, 503 bp, Oenanthe melanoleuca; identical to SEQ ID NO: 1366
  source 1..503: mol_type = genomic DNA

SEQ ID NO: 20507 - DNA, 302 bp, Serinus canaria
  source 1..302: mol_type = genomic DNA
ggcggcttgggagagtatagttacgaactgggcatcgctgcagagatcgcacctcctcgtggtcccgctggtagccctgcgtagggtgactaagtcgatcttctgccccagtacggagccgttgggaatcgccagcccaacgtcctcccgccaaaattcggtgaaacaaattcctcggtaaaagccgcgtggcttattgcccaaaacctggccccccggtttcataggggcaatgtctctggcaagtggactgaccacccactgccaacccaccgcccaaggtggtcccattccgatgggtt

SEQ ID NO: 20508 - DNA, 326 bp, Phylloscopus trochilus
  source 1..326: mol_type = genomic DNA
gaagaatagttactaactgggctcagctgcagaagtcgcacctcctcatggtcccgccggatgcccttgtggtaactaagttgacttttgccccagtgtgagtgagggcatttaccagccctccctattgttgggcttgccacccaatggtagtatcacgatctgctgaaacaaagagtttgccgcagcctgttcgctgttgcacagtgccttgtccacgggccgttgatgttggacaaaagttggtagctcgagagagggtcgactactgactatttctaccctcacttggactggtcatttctttaacttaccggactgacata

SEQ ID NO: 20509 - DNA, 302 bp, Erithacus rubecula
  source 1..302: mol_type = genomic DNA
gatgagggcatagttactaactgggcttatcagcggaagtcgcacctcctcgtggtcccgctggatacccttgtggtaactaagtcgacttctgccccagtgtgagtgaggacgtacatctgtcctccctgtcgttgggctcgccacctaatggtagtttcacaaattgctgaaacccaatagtttggcacagttagtttgctgttgcacagagctttgtccacgggctattgttggtcacagctggtagtttaggagagggccaactatcagctattacaaccctcacttagaatttctgg

SEQ ID NO: 20510 - DNA, 260 bp, Melospiza georgiana
  source 1..260: mol_type = genomic DNA
ggcggcttggagagtatagttaccaactgggcaaagctgcagagatcgcacctcctcgtggtaccgccggacgcccggtaaagggtgaccaagacgatcgatgccccaggatcggagccgtcgggaatcgccagcccgacgaactcctgcctaaaatcggcgacgcaaatttcacggtaaaaagccgcgcggcttcttgcccaaaacctggcccccgggtttctgcggaggcactgtcggggcctggccccccggttccg

SEQ ID NO: 20511 - DNA, 118 bp, Geothlypis trichas
  source 1..118: mol_type = genomic DNA
gttactgggttgatgacgatagtataatcctccgcctcctcgtggccccgccggacaacgagtctctgactcggccaagtgaggattacatcaacccctattttaaccctcggtcgtc

SEQ ID NO: 20512 - DNA, 214 bp, Phylloscopus trochilus
  source 1..214: mol_type = genomic DNA
atcagagtaactatgattctatttgaataaggtggtagggataagaattaaaaaaagctgagtgccttcacgctgcgtgaagcttagcactacccccccgaaaacaaataagaagaacgctaaaggacaagcggaaattgtccagaaaagagtaaattgactgatctatttttagttggacaaaaaaaagttctacgaactacccgacctaagc

SEQ ID NO: 20513 - DNA, 200 bp, Anniella stebbinsi
  source 1..200: mol_type = genomic DNA
cgaccatttggtgttgatattgatactggcgactggctagttggtgttggttgaaagcgctggcgaggttgagctgataattggttgcacgggttgggcacctcctagtggtgaccgctggatagggcttcggcctgagccaagatccaacccaccctccgttgctggcagaccccagtaactgagattaaacagctggt

SEQ ID NO: 20514 - DNA, 188 bp, Ascidia mentula
  source 1..188: mol_type = genomic DNA
cgctgtgtcaagagtctggttgctgggccgcagtcctgagatctcaacctccccgtggtcccgctggacaactctctgggagcctcgattttgggagttgactgactgagactcggctgctttcgatcctcctgccctactgttctggtgcaccggctaggcagtagaaccctacggtgaaaaattca

SEQ ID NO: 20515 - DNA, 207 bp, Crotalus oreganus
  source 1..207: mol_type = genomic DNA
gggtaactatgactctcttaatgctgtgtcaagagttggctgctgggccgcagtattgagatctcaacctccccgtggtcccgctggacgacgactctgggatgcccgttagggagttgactgactgagactcagctgctttccttcccctgccctactgctctggtacaccggctagacagtagaacgctacggtgaaaaacacta

SEQ ID NO: 20516 - DNA, 158 bp, Gopherus flavomarginatus
  source 1..158: mol_type = genomic DNA
cttagttgctggagtagcactgtaattggattcaccgcctcctagtggccccgccggtaacagaggtaatcctctggctgagtgtgaattctgctactccttacttttaatcttttaactagtgctgcttggtgtgcaggctaatctatcgtatcgat

SEQ ID NO: 20517 - DNA, 64 bp, Malaclemys terrapin
  source 1..64: mol_type = genomic DNA
tttgaataaggtgtaagtagtgaaaactgtccacctcatttgtatgagctgagtggttgaatct

SEQ ID NO: 20518 - DNA, 158 bp, Eublepharis macularius
  source 1..158: mol_type = genomic DNA
cttagttgctggagtagcactataattggattcaccacctccttgtggccccgccggtaacagaggtaatcctctggctgagcatgaatcctgctactccccctttttaatcttttaactagtgctgtttggtgtgcaggctaatctatcgtatcgat

SEQ ID NO: 20519 - DNA, 299 bp, Ascidia mentula
  source 1..299: mol_type = genomic DNA
atggtcatagttactaactgggcttagctgcagaggccacacctcctcgtggtcccgctggataccctaacgggtaactaagttggcctctgccccagagagagggggctttgctccctctcgccctatcgattggcctcaccgatctttcgatagtatttacggtgatacaaatttacggcaccgagttctactcgctgcccaaaacctgcgcccacgggtattagatgggcataaaccgacagtattagaggggaatactgtcggggtctgacaaccctcattccaaactggtcaaa

SEQ ID NO: 20520 - DNA, 299 bp, Eublepharis macularius
  source 1..299: mol_type = genomic DNA
atggtcatagttactaactgggcttagctgcagaggccacacctcctcgtggtcccgctggataccctaacgggtaactaagttggcctctgccccagagagagggggctttgctccctctcgccctatcgattggcctcaccgatctttcgatagtatttacggtgatacaaatttacggcaccgagttcgactcgctgcccaaaacctgcgcccacgggtattagatgggcataaaccgacagtattagaggggaatactgtcggggtttgacaaccctcatcccaaactggtcaaa

SEQ ID NO: 20521 - DNA, 297 bp, Ciconia episcopus; identical to SEQ ID NO: 1350
  source 1..297: mol_type = genomic DNA

SEQ ID NO: 20522 - DNA, 270 bp, Ciconia stormi
  source 1..270: mol_type = genomic DNA
ggcggcttatgagagtatagttacaaactgggcattgctgcagagatcgcacctcctcgtggtcccgctggataccctgcgtagggtaacaaagtcgatctctgccccagcacggagtcgttgggaatcaccagttcaacgatctcctgcttaattcggtgaaacaaatttgaggtaagagccacgcggccattgccctaaacctggccccagggtttaaaaaagagggcaaaagatcggtagtcggtgaagggggccactaccgttcta

SEQ ID NO: 20523 - DNA, 129 bp, Gallinago paraguaiae
  source 1..129: mol_type = genomic DNA
ggacatagttacatggtctggacgcctcctcgtggcgaccgctggataggggtgagagtgctcaccctgaactaagatccagaccaccctctgcattggcagattgccgtgcagaatttattgctgatt

SEQ ID NO: 20524 - DNA, 340 bp, Garrulus glandarius
  source 1..340: mol_type = genomic DNA
gggacggcaccttgaagaggtatgagagcttaacccgtgtcatgagcaatacggaagggaccgacgtctatccgttaacgcccgcctgactatgacagtcacgcccaaggcggagctgtacaggggagtgcacaccgaggggtccctcacactggacacctccgggtgtcccaatgagtgtaccggccaaggggtgcctcgtaggtttaaccatacctggtaggtccgttcacgagcgagtcgacgcgttggcacgatggcggaagtctcagtaggtactaccaagtccgtaaggtcaggtcactttggggaactaagatcgtccgaaaaatcatgaaca

SEQ ID NO: 20525 - DNA, 305 bp, Aquila africana; identical to SEQ ID NO: 1865
  source 1..305: mol_type = genomic DNA

SEQ ID NO: 20526 - DNA, 336 bp, Falco fasciinucha
  source 1..336: mol_type = genomic DNA
ggcagcttgagagggttggttactaactgggcttagctgcggaagtcacacctcctagtggtcccgctggacacccgtaaagggtgactgagttgacttctgccccagtgtgagtgagggggtttactctccctccctgttgtctggactcgccacccagcgacagtttcacgaattcgctgaaacaaataataattggcacagctattagctgtcgcccagagcctggtccacgggtctaagttggacgcagttagcagcgtgggggagggccccgctgttgactttgacaaccctcacttggacgtgtctcaattttttcctcctaatttgacc

SEQ ID NO: 20527 - DNA, 378 bp, Otis tarda
  source 1..378: mol_type = genomic DNA
gggcgggagtaactatgactctcttaaggcagctttagagagtcaggttacaaactgggcttagctgcggaagtcacacctcctcgtggtcccgctggacacccgtatagggtgactgagttgacttctgccccagtgtgagtgagggtgctttatcagcctctccctaccgtttggattcgccacccaacggtagcttcacgatcttgccgaaaccaaaagcaattggcgtagcttctgagctgctgcccagagccttgtccacgggctacagttggacacagttggcagtgtgggagagggccacctgctaacttcgacctccctcacttgattttaacattttaacatttactagtttttaatctatttctgaca

SEQ ID NO: 20528 - DNA, 270 bp, Erithacus rubecula
  source 1..270: mol_type = genomic DNA
ggcggcttatgagagtatagttacaaactgggcatcgctgcagagatcgcacctcctcgtggtcccgctggataccctgcgtagggtaacaaagtcgatctctgccccagcacggagtcgttgggaatcaccagttcaacgatctcctgctaaattcggtgacacaaatttgaggtaaaagccacgcggccattgccctaaacctggccccagggtttaaaaaagagggcaaaagatcggtaggcggtgaagggggccactaccgttctc

SEQ ID NO: 20529 - DNA, 332 bp, Acridotheres tristis; identical to SEQ ID NO: 1361
  source 1..332: mol_type = genomic DNA

SEQ ID NO: 20530 - DNA, 298 bp, Aphelocoma californica; identical to SEQ ID NO: 1351
  source 1..298: mol_type = genomic DNA

SEQ ID NO: 20531 - DNA, 112 bp, Cichladusa arquata
  source 1..112: mol_type = genomic DNA
ggcggcttttgagagtatagttacaaactgggcatcgctgcagagatcgcacctcctcgtggtcccgctggtaaccctgcgtagggtaactaagtcgatcttctgccccagg

SEQ ID NO: 20532 - DNA, 111 bp, Xenus cinereus
  source 1..111: mol_type = genomic DNA
ggcggctttggagagtatagttacaaactgggcatcgctgcagagatcgcacctcctcgtggtcccgctggtagccctgcgtagggtaactaagtcgatctctgccccagg

SEQ ID NO: 20533 - DNA, 329 bp, Chamaetylas choloensis
  source 1..329: mol_type = genomic DNA
gatgagagcatagttacaaactgggcatagctgcagaggtcgcacctcctcgtggtcccgctggataccccttgtgggtaaccgagccgaccttctgccccagttcggagaagtggttagagcctctctctccctatcgctcggcctcgccaaccggcgatagtacagcgcttggtgaaacaaacttatggtaacagttgtctctggacctgttacccggagccttgcccgctggctttagttgggcacagctcaacagatatctgagggtgctctgtcgggttctacaaccctcactttgatttactctttttaccgaatttgtcaaa

SEQ ID NO: 20534 - DNA, 339 bp, Cichladusa arquata
  source 1..339: mol_type = genomic DNA
ggtagccggagagagctagttactaactgggcatagctgcagaagtcacacctccgcgtggtcccgctggatgcccgtaaagggtaactgagttgacttctgccccagtgtgagtgagggtgcacaagttgccccctccctatcggttggactcgccacccagcggtagtttcacaatttgcagaaaaaccggtttggcgcagccgttcgctgttgcccgaagccttgtccacgggctaagttggacacagtctgcagctggtggagggttctggctgtggacttggacaaccctcaattgattgtgacagtgaccaattaccatctttcggtcttaca

SEQ ID NO: 20535 - DNA, 324 bp, Myiozetetes cayanensis
  source 1..324: mol_type = genomic DNA
gatgagggcatagttacaaactgggctccgctgcagagatcgcacctccccgtggtcccgctggatgccccttgtgggtaactaagtcgatctctgccccagttcggaggaggggcattgcctctctctccctatcgtctggagtcactacccagcgatagtattcaaaatagtgaaacaaattttttttggtaatagcttacgaagtaaattacccaattcccttgctcacgggttttgagttgggcacaggttaacagatactgagggaaactgttagccttataccccctcacttggattggcaaatataaataccgcaag

SEQ ID NO: 20536 - DNA, 331 bp, Prinia subflava; identical to SEQ ID NO: 1360
  source 1..331: mol_type = genomic DNA

SEQ ID NO: 20537 - DNA, 299 bp, Cossypha archeri; identical to SEQ ID NO: 1342
  source 1..299: mol_type = genomic DNA

SEQ ID NO: 20538 - DNA, 299 bp, Cossypha dichroa; identical to SEQ ID NO: 1343
  source 1..299: mol_type = genomic DNA

SEQ ID NO: 20539 - DNA, 299 bp, Geranoaetus albicaudatus; identical to SEQ ID NO: 1341
  source 1..299: mol_type = genomic DNA

SEQ ID NO: 20540 - DNA, 295 bp, Harpyopsis novaeguineae; identical to SEQ ID NO: 1349
  source 1..295: mol_type = genomic DNA

SEQ ID NO: 20541 - DNA, 293 bp, Melierax canorus; identical to SEQ ID NO: 1348
  source 1..293: mol_type = genomic DNA

SEQ ID NO: 20542 - DNA, 327 bp, Scolopax minor
  source 1..327: mol_type = genomic DNA
ggtgagagcatagttacaaactgggctcagctgcagaggtcgcacctccacgtggtcccgctggatgccccttgtgggtaactaagtcgacctactgccccagttcggaggaggggttttggcctctctctccctatcgtctggagtcactgcccagcgatagtattcaaaaacagtgatacaaatttttttttggtaatagcttacgaagcaaattacccaagcaccttgctcacgggttctagttgagcacaggttgacagatattgagggatactgttgaccttataccccctcacttgaattggcaattatatataccgcaag

SEQ ID NO: 20543 - DNA, 249 bp, Limnodromus scolopaceus; identical to SEQ ID NO: 1356
  source 1..249: mol_type = genomic DNA

SEQ ID NO: 20544 - DNA, 332 bp, Myiozetetes cayanensis; identical to SEQ ID NO: 1362
  source 1..332: mol_type = genomic DNA

SEQ ID NO: 20545 - DNA, 298 bp, Acrocephalus scirpaceus
  source 1..298: mol_type = genomic DNA
gacgggatcatagttactaactgggctcagctgcagaggtcacgcctcctcgtggtcccgccggataccctcttgggtaactgaagtggcctctgccccagtgtgatgagatatggttacttcctccctatcaagtgacttcaccgaccacttgatagtatctaattggtgatacaaaatttcggagtcttaattgactacccagagcctggcccacgggcctatgttgggcgcagtctgacagctcgtaagggagtgctgtctggcttaaatttgacccttacctggatttgacaaa

SEQ ID NO: 20546 - DNA, 133 bp, Chamaetylas fuelleborni
  source 1..133: mol_type = genomic DNA
aagatcatagttgcatgacttggacgcctccgcgtggcgaccgctggatatgatactacggtatcagaactaagatccaagtcacccctctgccctactaacggaaggcagagggattgttactggtttgaat

SEQ ID NO: 20547 - DNA, 312 bp, Tyto alba; identical to SEQ ID NO: 1850
  source 1..312: mol_type = genomic DNA

SEQ ID NO: 20548 - DNA, 311 bp, Buteo platypterus
  source 1..311: mol_type = genomic DNA
gaagtcttatgactctcttgagaaatcatagttactaactgggcttagctgcagaggccacacctcctcgtggtcccgctggataccctcctgggtaactaagttggtctctgccccagtctccggagctttgatgctccaaactatcagtgagctcgccactgactggtagtattttggcgaaacaaactttagtggcaatttaattgccacacgctagcctagcccacggcgtagttagttgggcaaagtcatttgctctttgaggggagagcttctgactgattcctccctcacattgacttgacaaa

SEQ ID NO: 20549 - DNA, 185 bp, Setophaga kirtlandii
  source 1..185: mol_type = genomic DNA
gctgtgtcaagagtctggttgctgggccgcagtattgagatctcaacctccccgtggtcccgctggacgactctctgggacccccggtagggagtcgacaaactgagactcagctgctttcgttcccctgccctactgttctggtacaccggctagacagtagaacgctacggtgaaaaacactg

SEQ ID NO: 20550 - DNA, 176 bp, Colaptes auratus
  source 1..176: mol_type = genomic DNA
tggctctccatgcgtctctggaccctttcagttcctgagctcggacggttacattgcctaagggtagtgagaggatgggttattggtgaggtgtgagatgggcgtgagcctagccactaggggcaatctccaccaagatctgagcctttactccacgcctgttagagctcggggtt

SEQ ID NO: 20551 - DNA, 187 bp, Emys orbicularis
  source 1..187: mol_type = genomic DNA
ggctgtgtcaagagcgtggttgctgggccgcagtattgagacctcaacctcctcgtggtcccgctggacgactctcatgggaacctcaatatcgggagttgactgactgaggctcagctgctttcctccctgccctactgtcctggtacaccggctaggcagtagaacgctacggtgaaaaacacaa

SEQ ID NO: 20552 - DNA, 119 bp, Aldabrachelys gigantea
  source 1..119: mol_type = genomic DNA
cttaacctattctcagtcttagtggcctttacctcctagtggtcccgctggtaactgtctctatacaactctactctgtgagaggaagtacatagaggcaggccaaacaaggttctatc

SEQ ID NO: 20553 - DNA, 735 bp, Caretta caretta
  source 1..735: mol_type = genomic DNA
tggaaaggataagcgcaacacatctatacttccaaagaagattgacttagcctctacctttcaagtcctacttccgcgttctcgtcgtgagagttgttaacgttaacacggaccaagttgaagagggcggacgccacattcttagaatgacgcatcacgccctatccctataggggagacactgtgaattcaatgcaaaccagcgagaatggtagcgaaagcgccattcgctgagctgcttgcaataagaattcgaaaaacagtgtggtcaacaaagtcatgataggaagggtctatcatgcaaaagagctgaattgttgtaggtgtaaggtcagctgccatacttaccccactgaaacttatattcggctcgaaagttgcggccagtagattttgacgcggacaccagcatattgagttatgctttgtgtgtacgccgaaagatcgaaaggccaagcccatagctccccgacggttcctactgaggggatagggcattttcattttaattatattatttttttaatatatatgagtcattcaagtggcaatggcaatgataccaagatcgagtgcatgatacggtggagccttttaaggcggagttatctgtaagatccctcctaaagggttacatagggcttttgccgggaggtaagtcttgcagataattatgatgcaaatcccaaaacctatggattttggtactatgtaaccaacgggttctaggcctaa

SEQ ID NO: 20554 - DNA, 978 bp, Pleurodeles waltl
  source 1..978: mol_type = genomic DNA
ggcgttagcgcccggctcagggctcaagtggcgcggctacactcccccttaagaggtgcggccctacggcccccttaggcgtgaggcagtgggcccccttgaagctttgagttgcgtggcggggcactccttaaggcagccgaaatactggctgtcccaagaaacctgcggacttgggtgaggtctctagcatgtcctataggcgtggttggccttgagccaagccgcggggtgctagggcgtagttacaagggacgtatgcgaatacatagcctctggcgtccttagtcgtgggaggtacctccaagttgggactacgccgggatacccagacgtgggtatgcagaatccttacacgacgggaggtggcgttcgaaacccgcaaaaaatttgtggatagaacgcgcctcttttgagttcccaacgcgctcgctttgcgaggtagataatagtaagagatacatacgtgtctctccaagaacaatacctggtggtgcatggcaaaacaatcgtagccaatatagtcggcacgaagaaacagctctctgagcaaaaactgtagtaagaggtgcaacagaagtatagaacaacaagacgaagtcttgcataatcaaagacgattgcatgggggccctaacctgcttggcaggagaggcccccaaatttgcgttaatcgatcttgagcaaaccggctataaagccgtctggggcggtattatccaccatggcaaagcaacacgccgccaatactctataatatcggttggcaaagcaatacgcagccagtacttgcaaaacctagcgtggcggcaacgtccggggtggagcaggaaactggcagggcgatagtaaggcaagaggaaggcctcgcagagcatagcgtgttgggtgaatctatgacgaataggcatgcacttggaaatgagaaggaatgaattggactaatgtacccggcaaatacaaaattgttacttacca

SEQ ID NO: 20555 - DNA, 871 bp, Pseudolycoriella hygida
  source 1..871: mol_type = genomic DNA
gacgtgttttccaagagtccctgaaatcggttttttttgtcgggaaatcgcaagtttcggtgctttgagtataagtattctcaagtataagcaaacgggcttcagtttgacaccaatttcgcttcttcatcggcaatatttaccgaaatatctgcaaaagaaatttgtgaacaatttacctccacaccccatagtgaaaaagaacaaaaaaccacggcagttctttatataattcccaggtgtcgatcagtgcccgggtctatatctatagcgataaatatacctgaagttaccacctatcttttaatatataaaacgcttctgtgctgtgcggggtttcgcggatattttgtgtcaaagaaactagaaattgcagttcactaccacgccccatagagaaagtgaacaaaaagcaggccagacttatatataattcgcacatgtccatcagcgcccgggattatatatatggtgaaaaatattcgtgaaattaccacctttcatttgatatatgaaacacttctgtgctgtgcggggttttgtgaatatttcgtgtcgaaaaactgcaaataattctacaaatttatcggaattctgttccattccacctactggaacagctgatttaaattacacttcagttagataagccaaaaatagtccgaattccatctcggtccgataactttaaatcgagtgcgaatataatcgataacacacgaaagtgtcagataattcgaaaaaaatatttctgatcgtcgcggaactacttttcgggatttttgttaaccgcgtctgaggaattcactcccgtaggtcagcgtggtttaaaactaatatataaactccggccaaagcgaaatttaacgct

SEQ ID NO: 20556 - DNA, 818 bp, Andrena bucephala
  source 1..818: mol_type = genomic DNA
cttttgacgtgtacggacgtgtttttaaatagctgcctgtaaatatagtgtcttttgtatgtaactttcacagttcttgtgatacaaacttagaattttgtaaatagactatacagtgtattttgtgcaaacattttaattttctttaaattcgaacggtaaatacgcgagttacggtttttctgcaataactccagttacattaacggtacagacttaaaattcaaaataaagcggtattattatttagttaatatttctggaaagtttggtgcaaatcgcgccagtagtttttgagttagtgcgattttaatattttcttttcaattattaccgctacaagcatataccagccgtgtgctttaaccaacatctgctgcatatcatacagagtgcacgtgataaaattgtacctagcattgcttgataacttgttttgtaggttatctgacctcgaaagtttcctgaacttgtgtatatcgcttgatacatcttccgtgatataaatctaatatcaccacagtaaaatcgcacgacagaaatagcatacgatttatatcatgagagctggtaacacattaattgcaatttaacctactttaacagcctgcgtgatagatataaactcgcgtgatataaatatcatgagagtcactactaattcaactaattgcctgtaactttgaatatattgatacttttaaacacgtgtttcgtatttttgtcttcagtctgggagtttgttaacacctcaagtgttatagtaaagtgcgtagccaacaatctttattttcttacttatagcgagaattcccgct

SEQ ID NO: 20557 - DNA, 931 bp, Brachypalpus laphriformis; identical to SEQ ID NO: 1871
  source 1..931: mol_type = genomic DNA

SEQ ID NO: 20558 - DNA, 736 bp, Acrocera orbiculus
  source 1..736: mol_type = genomic DNA
gtggactctcgatcgagacggacgtgtttcctcgtcgcgcaacaagaaagagtttagtccgggaaaaacgcaagctagaacttaaaggttatatttgtcttaaagcggcgcgtctcttcttcactttaacgcaaagttcgcgaaaatccgcagccggattgccgagatatcgtcggataaaaacgcgaagtggagaattgagatttggtgcaaaacacgtgtccatcagcggatataccatcgcggcgtggagttccatcggcggtaaacagcagaactacgggtttgtgcatgcactacgacaccttccttgtatcacaaccaccggagtgcgcacgtcaaactgtgatttgtgctcctgctggaatcatctagtacaacaacccgcttccagcagcagcgccatcggtggtaacactagaagcacgggtttgtgcatgcactttgggttaccctacatcacaaccaccggaaaagcacctcaaacagtggtttgtgctaatgctgctagaatcatctaatgcgggaaccatcgtggaaaaatagtacaacgaagggcttgtgcatctacttcgggacctacccaacatcacaacccccgaagagaccactttaagctgtgccctgtgcttctgctataaccatctcaggcaggagcccgtattcaagaacaccacctaatcgatcgaccgagagaggagcttcggaagaaaacaaatacgaagtatagacagcg

SEQ ID NO: 20559 - DNA, 176 bp, Acrocera orbiculus
  source 1..176: mol_type = genomic DNA
agggatgcggaatcgcgtccctgccaaatgggggtgtggggtcagggggcagaggtttacgtccatcttacctctgtctcgtctggaaacccacctcaaggccaacctccacgtccagcccttaggcaaggctacgtggcgccggataagggaccattatatatgcccggtcctag

SEQ ID NO: 20560 - DNA, 599 bp, Brachypalpus laphriformis
  source 1..599: mol_type = genomic DNA
gttattagagggtcaatgtaccatatcgtcctggcaagtacaaaagggatatcccggaaagccagggtgttagacttacttataattattgaaagtaatcctgttgtgaaagggaagccaacatacttggtttatccagtatggaggcctactgtatcaggcggatgaaatcaaggcaattatacggcaatcacatcctaccaaccagacatatcagtcagggcggtcaggttaatgattagctgaaacgcattaggtattataccttttgccataacaaataattaagtaaactttacctaacttctttgaagttttgtaaattaaatattaaatacttaaaaactaaacaacttataagtccttgaaatgtaagtcaaacatagatatttcttaaacttagtacttataaatgcttcggtgtttataggggacagattaaggataagtacaaccaaataacatagagatcatggaagtaccgagtcttcaacctcctcgtggttcctgctggtaacttgtgtatttattttaaaatacataaggctaatgaagacagggcttaggtttctagggttaccagcccttttaacctataa

SEQ ID NO: 20561 - DNA, 599 bp, Andrena bucephala
  source 1..599: mol_type = genomic DNA
gtcgttagatggtcaatgtaccatatcgtcctggttagtaccaatagggaaagccagggtgttagacttactaaaaattaaataaaagtaatccgttgtgaaagggaagccaacatacttggtttatccagtatggaggcctactgtatcaggcggatgaaatcaaggcgattatatggcaatcacaccctaccaaccaggcgtattagtcagggcggtcagggtaatgattagccgaaacgcattaggtattataccttttgccctaacaaataattaagtaaactttacctaacttctttgaagttttgtaaattaaatattaaatacttaaaaactaaacaacttataagtccttgaaatgtaagtcaaacatagatatttcttaaacttagtacttataaatgcttcggtgtttataggggacagattaaggataagtacaaccaaatgactaagaagacatagaagtgccaagtctccacctcctagtggttcctgctggaaacttttttcttaccaaggtattaaaaaaggcaaacggagcgggcttagcggtctagggggttaccagccctctagactttaaactaattggt

SEQ ID NO: 20562 - DNA, 595 bp, Acrocera orbiculus
  source 1..595: mol_type = genomic DNA
gtcgttagatggtcaatgtaccatatcgtcctggttagtaccaatagggaaagccagggtgttagacttactaaaaattaaataaaagtaatccgttgtgaaagggaagccaacatacttggtttatccagtatggaggcctactgtatcaggcggatgaaaatcaaggcaactaaatggcaatcacaccctaccaaccaggcgtattagtcagggcggtcagggtaaagattagctacaacgcattaggtattttataccttttgcccaaacaaataattaagtaaactttacctaacttctttgaagttttgtaaattaaatattaaatacttaaaaactaaacaacttataagtccttgaaatgtaagtcaaacatagatatttcttaaacttagtacttataaatgcttcggtgtttataggggacagattaaggataagtacaaccaaatgactaagaagacatagaagtgccaagtctccacctcctagtggttcctgctggaaacttttttcttaccaaggtattaaaaaaggcaaacggagcgggctataatagtcttgggggttaccagccctctcgaccgtataa

SEQ ID NO: 20563 - DNA, 669 bp, Acrocera orbiculus
  source 1..669: mol_type = genomic DNA
tgttttggtgtgcggacgtgtatcaaatcgctccgtcaaaaagtgaaattaataatagttacagctcgtattcaaaaagtaaaaactcggaaaagtttaaataaggtcactcccgtcattttaaaacaaaaatcaagcaataagaccaccgcgtttgctcacaatttgtgtttaaattttttgaattgcatttgtggaaaaaaaaaataaattgattcgggagagaatttcggaaaaaaaatataaagagacgatatcgtccacatagcacccacagaaaatcccattgaaaacgacatcacgccatctggtaagaaatagccggaaactccaacttccccggtttgtgtatctgatacataactttaccaatcaacatctggttgtaattttcgctaaatatttgcgccatctagcaataagagctcacaccttcaaaataacacctagtgaagacaccttccactattttaataattccgaagaacagaaccgagcataatcaccagcttttgacacaaaggggaatttcaccataaatatttcctggctaaatattcacatttaatatacatcaattgatgaagagagttttgctaggattttatattctagtttgtattgtggtttaatatccaaaaactataccggtcttgtgaaatttccaca

SEQ ID NO: 20564 - DNA, 1000 bp, Acrocera orbiculus
  source 1..1000: mol_type = genomic DNA
tagtattggtgtgcggacgtgtatcaaatcgctccgtcaaaaagtgaaattaatattagttctagctcgtattggaaaaataaaaactcggaaaagtttacataaggtcacccccgtcattttaaaacaaaaatcaagcaataagaccaccgcgtttgctcacaatttgtgttttaattttttgaattgcatttgtgaaataaaaaaaataaattgattcgggagagaatttcggaaaaaaaagcataagagacgacatcgtccacatacgatccacataaaattccatctcaaaattgtttttgttgtaataatttcccttgattctgtgaagaatccacctaattcaccacctttttcacctttttcaccaccaaagtttaaagccattttccatagcccccagccatctgtcacccgaaatactaaaagtgccccctagtctgacatttcatctgtcattttccatcaaaaaattgtgaaatcactcgaggattgctctagaactttcggattacttttggtattcaattttctcaaaatctgtaaatttcccctcgaaaataaaataataagtgaagctccgaaccccaacctcttcggttacagtcttgaatacgacatcacgccatctggtaaaaaacagcaggaaactccaacttctccggtttgtgtatctgatacataattttactaatcaacatctggttgtaattttcgataaatacttgcgccatctagcaaaaagagctcacaccctgaaaataacacctagtgaagacactttccataattttaataattccgaagaacagaaccgaacaaaatcaccagctttcgacacaaaggggtatttcagcattaatacttcatggctaattattcacatagcaaagcacattcaaacaatagaaagagagtattgcgaatttaaattattcgtatagaagtgtggtttaattaccaaaaataaactaaccggtcttgtgaaatatccaca

SEQ ID NO: 20565 - DNA, 491 bp, Meliscaeva auricollis
  source 1..491: mol_type = genomic DNA
gcagcggccaataactctgtatttgaagttcttctctcggccaaagaaataatgaaaaatataaaggggatgaataagaactctgcaccaggccctgataagatcagcctaagagacctactccaagcggatccggaaggtattgctcttgcgaaattgtttaatacatggcttattactggtatgatacctgataccataaaagaatgtcgttccttattgatccccaagactgcagaccctgaggccctaaaagatctggggaattggaggcctttaactattggcgggagtaactatgactctcccaggctgtgtcaagagtctagttacagggcagcagttttgagacctcaacctccccgtggtcccgctggacgactcattgggtgattgagttgaccaactgaggctcaactgctttcgatatcccgccctattgttctggtacaccggccaggcaatagtattaaacggtggaaaactacgag

SEQ ID NO: 20566 - DNA, 258 bp, Meliscaeva auricollis
  source 1..258: mol_type = genomic DNA
cttaaggaggatcaatgggtctgcagaaggggaataatggttcatttctcagcaatggcaaatgggctaccgtccttcgttagtcagatcaagtcgactcataggcaacatgtgccccactaaaatgtggcctcctcgtggtgtcctccgggtgctggaccgatgtagtttcggcagcagcgaatatgagcggcgaaaggggccattgggttaccaccccgatggtcctgaaaaactgatggtgcaaactctaataac

SEQ ID NO: 20567 - DNA, 1277 bp, Mauremys mutica; identical to SEQ ID NO: 1872
  source 1..1277: mol_type = genomic DNA

SEQ ID NO: 20568 - DNA, 568 bp, Drosophila sulfurigaster
  source 1..568: mol_type = genomic DNA
ctttgctttcaccttgacgtcccgggtcttgtatcgtcctcctctgttacgagggcactagaaacaacatctatggattctacgaccgcagccaagcagctttcatcagggtactcatctgtgcctggttcgatgacggcttcttgtgtaatcattctgttctttttgtttgtcttatttatttatctctgtttacttatcatcatttccatgttatttatttagcttttatgtttatttatttctatgttatacgtagttctatcctcccttatgttccttctctcttctttatacattgtattactatctattttacttaccatttttgataggctgtttctctctctttttctctctctctttattcctttcttttgccaccctctatcttgaggccttccttctatttcttctcttactactttccacttttcgctttcattttcattttcgtccttcacaatatagtctctcgctcggacggccgggcccgtactttggactaagggaaggggtctttggggtatttacccttcgcttcattgggttgccagcccattgaagc

SEQ ID NO: 20569 - DNA, 635 bp, Rhopalosiphum padi
  source 1..635: mol_type = genomic DNA
ggactttggtcgggtacggacgtgttttataatcgctccgcagtaattttgaatttttctttataacttctacagttttagtgctacagttttgaaactttgtagaaagattaataagtgcaccttgtgaatatattttacattttattgaattctaacggttaatccgcgagatatcgataaaactcaataactcccgttatttcaacggtaccaagatcaaactttataaaaaccgaggaaagtaattgataaacattacttaaaattttggtgcaaatcgcgcttatacttttcaaaatatcgcgattttattatttttaaaagtgatttactgctataagcatctagtagccgtgtgcaataaacaacatcagctgcatgtatcatgcagagtgcacgtgattatatctaaatacttcatgggcgttgcttattaaaacatgttttacttgtcatttgacctcgaaggttttctgaactttgagggtatcatcgtcaacatcttgcatgatacaaatattaataacatcacacaactttcatgtgataaatatcgtgatatttatatcatgatataagtatcatgagagctggaaattactaaaattcttttagagagctgacactgaaat

SEQ ID NO: 20570 - DNA, 190 bp, Nemotelus nigrinus
  source 1..190: mol_type = genomic DNA
gtgtggtagttctggttcagtccgatcgccacggaaaggtcccgcaagggtctgattcttaagagagttgtagatgtgcctacatcgcacctcctcgtggtgctcgccggtaacggtcttcggatcggctaagcgatggggtctagggggttctcatgggctgccaacccttgaatccccttaaaaatca

SEQ ID NO: 20571 - DNA, 844 bp, Acrocera orbiculus
  source 1..844: mol_type = genomic DNA
cacagcattaccacgggtcggtgtctaagaccgaatggcccttatgtggtgagcgtccgatagtgacgttggtggcacgtatgtaccctacttgcgtcatactctacacccactaatgtgtctcccgagtggaaccatttatgtcgagaagcctctggcttcgttgagacaaaacttggttgccaatgacccgtcatctcaatagtgacgcagaaaatctatgaccatctaaggtgcctcatgtcccgtcatcccaatagtgacgtagcaaatctatgaccatataaggtagacacgatgacccgtcatctcaatagtgacgaaacaaacctatgaccatcgcaggtaaacgcatgacccgtcatataattagtgacgtactgttaccaaatgacccgtcatctgtagtgacgctcgaatgaagtgcacaatggcaaagagaccatagccattttgtcggctcaactaatgacaagcagtcctctgcggagtctgcagaatcaatgagaaagcaagaggtgtcaggtattggaaaaaggacatggtcctagatatgtaagaaagtgagatgggggtcctatccggtatataccggtaggcccccattttcacgtcgaaaactatgagccgacaatgcgcttcacgcacgggccaaagctcctcgatcactattgaaagcaatacgcggccaggacttgccctgcggcacgcggagataggagaaggcaccttcgggagaggtaaacgggcagagaggaaggctgttgacgactaggcttgtaaatggttatgagaggaaacggattggaatgatgtacccggcttacaaatccaacctatttca

SEQ ID NO: 20572 - DNA, 182 bp, Chlorops oryzae
  source 1..182: mol_type = genomic DNA
cggctgtgtcaagagtctagttactgggcagcagtactgagacctcaacctccccgtggtcccgctggacgactctttgggtgatgagttgaccaactgaggctcagctgctatcaatatccctaccctattgtcctggtacaccggccaggcaatagtattaaacggtggaaaaccacaag

SEQ ID NO: 20573 - DNA, 120 bp, Andrena bucephala
  source 1..120: mol_type = genomic DNA
cgggtcgtagttacatggcctgggcgcctcctcgtggcgaccgctggagaagatggggacgaatctcgtctccatccgagctaagatccaggccacccccctcctctgggctaaccatcc

SEQ ID NO: 20574 - DNA, 51 bp, Mauremys reevesii
  source 1..51: mol_type = genomic DNA
gagttgtagttacacggcctgggcgcctcctcgtggcgaccgctggagaag

SEQ ID NO: 20575 - DNA, 187 bp, Aspidoscelis tigris
  source 1..187: mol_type = genomic DNA
tgctgtgtcaggagtctggttgctgggccgcagtattgagatctcaacctccccgtggtcccgctggacaactctctgggaacctgcgatatgggagttgactgactgagactcagctgcattcgatcccctgccctactgtcctggtgcaccggctaggcagtagaacactacggtgaaaaacaaa

SEQ ID NO: 20576 - DNA, 187 bp, Aspidoscelis tigris
  source 1..187: mol_type = genomic DNA
tgctgtgtcaggagtctggttgctgggccgcagtattgagatctcaacctccccgtggtcccgctggacgactctctgggaacctgtgatttgggagttgactgactgagactcagctgcattcgatcccctgccctactgtcctggtgcaccggctaggcagtagaacactacggtggaaaacaaa

SEQ ID NO: 20577 - DNA, 23 bp, Mauremys mutica
  source 1..23: mol_type = genomic DNA
ggccaaccacccaggggaggttt

SEQ ID NO: 20578 - DNA, 185 bp, Mauremys reevesii
  source 1..185: mol_type = genomic DNA
gctgtgtcaagagtttggttactgggccgcagtattgagatctcaacctcctcgtggtcccgctggacgactctctgggatccctgtttgggagttgactgactgagactcagctgctttcgttcccctgccctactgttctggtacaccggctagacagtagaacgctacggtgaaaaacacta

SEQ ID NO: 20579 - DNA, 143 bp, Aspidoscelis tigris
  source 1..143: mol_type = genomic DNA
gtcatagttacatggcctgggcgcctcctcgtggcgaccgctggagacgatggggtacgcttaagggggcaagtccctcgatccgtccccgtctgagctaagatccaggccacccctcttctgggccaaccacccagtcgagg

SEQ ID NO: 20580 - DNA, 182 bp, Actinemys pallida
  source 1..182: mol_type = genomic DNA
cggctgtgtcaagagtctagttactgggcagcagtactgagacctcaacctccccgtggtcccgctggacgactcattgggtgatgagttgacgaactgaggctcagctgctatcgatatcccgaccctattgtcctggtacaccggccaggcaatagtattaaacggtggaaaaccacaag

SEQ ID NO: 20581 - DNA, 90 bp, Aspidoscelis tigris
  source 1..90: mol_type = genomic DNA
ccaggctgtgtcaagagtctagttacagggcagcagttttgagacctcaacctccccggggtcccgctggacgactcattgggcgattga

SEQ ID NO: 20582 - DNA, 183 bp, Mauremys reevesii
  source 1..183: mol_type = genomic DNA
cggctgtgtcaagagtctagttactgggcagcagtactgagacctcaacctccccgggggtcccgctggacgactcattgggtgatgagttgacgaactgaagctcagctgctatcgatatcccgaccctattgtcctggtacaccggccaggcaatagtattaaacggtggaaaaccacaag

SEQ ID NO: 20583 - DNA, 182 bp, Mauremys mutica
  source 1..182: mol_type = genomic DNA
cggctgtgtcaagagtctagttactgggcagcagtactgagacctcaacctccccgtggtcccgctggacgactcattgggtgatgagttgacgaactgaggctcagctgctatcgatatcccgaccctattgtcctggtacaccggccagacaatagtataaaacggtggaaaaccacaaa

SEQ ID NO: 20584 - DNA, 191 bp, Mauremys reevesii
  source 1..191: mol_type = genomic DNA
gctgtgtcaagagcatggttacagggctgcagtactgagaccccaacctccccgtggttcccgctggacgactctctcgggtgctggatggagagttgactaactggggctcagctgcaaacgatattcccgaccctactgtcctgtttcgccggtcaggcagtagtactctacggtgaaaaacactaaag

SEQ ID NO: 20585 - DNA, 105 bp, Rafetus swinhoei
  source 1..105: mol_type = genomic DNA
gttacagggccgggcgcctcctcatggcgaccgctggatagggtgggaagcattggtgattccaactactggcggagggtgtcatgtcggcccacctgaactaag

SEQ ID NO: 20586 - DNA, 238 bp, Schizopygopsis pylzovi; identical to SEQ ID NO: 1849
  source 1..238: mol_type = genomic DNA

SEQ ID NO: 20587 - DNA, 126 bp, Schizopygopsis pylzovi
  source 1..126: mol_type = genomic DNA
gggctctagctcttttggggggctgtgcccattgacagtagctccgtgggaaagagctgctggggtgctgcagaaacatagtggccctcacctcctcgtggtcccgccggtaacacaccctagggt

SEQ ID NO: 20588 - DNA, 829 bp, Melanotaenia boesemani
  source 1..829: mol_type = genomic DNA
catcgagggagcatcaacaacatagtccaccgagagacaatgtccccgaccaaggagatcaaatgtcaataggaccaacaaggatgaccgaagtggacgatctaccaaggatatactgcttacttattgggcgggagtaactatgactgttacatggcccgggcgcctcctcgtggcgaccgctggatagggtgggaagctttggttattccaactaccggcggagggtgtcaagtcggcacccccgcctgcaacccacccgaactatgatccgggccatcccagtcgggccaaccacccgcctgggattttctgctggttacaagaaaaaagaaattaagtaaaaatcctggtccctctggaaaccaggattacagcagcggtgaggctgttaaggaggctggaacttttgaatctgtctcaggtcccatatcgagtgataatacctgtgaagactgtggcttgactttcccatcgtcaagaagcctgggcatgcatagataccatcggcacccagtggaagttaaccaagagaggattacggtgcttcaaggaaggaggaaaggatggtcaaacggagaggataatgaattaagagctaaggcagactcgatctggagagtcggcatgaagaaggatcttttaactcacctgcacgttacctttcctcaccgcaccctggaggcactgaagaaaagacttcaactcctgaagtggacatgcaccgtaacatcgagggagcatcaacaacatagtccaccgagagacaatgtccccgaccaaggagatcaaatgtcaataggaccaacaaggatgaccgaagtggacg

SEQ ID NO: 20589 - DNA, 432 bp, Gymnocypris eckloni
  source 1..432: mol_type = genomic DNA
cgccgtttacccacgcttgggaagaagcaatacctcctcgtggtccaactggtaacactcaaactctgatctccattgtgcgagtggctaaatttgcttcgtctttcctctgagagtgtgttgccctcgggcaaacattttccgtccctgcgtagagtcattgttgcgtcaattgacttttacactctcagggggcattttattattttaggtattataccatatctgctgtccgggacgagtctttacgagactgtgttgtgcgtcgccgaatatttttaccaattttgctattggccagtgcttttattttgtgttgtgccgtgcgggttgtgccgttcgttctttgtgttgtgtggttcgtatttttggtgtcgtcttcgggcgtttttatatacatttattgttcgaattgaataaagtttcgttgcc

SEQ ID NO: 20590 - DNA, 3737 bp, Zoroaster sp. YZ-2022
  source 1..3737: mol_type = genomic DNA
ggtatgactgaaaggaaaagtcctgactggccggggtaccaggggcgagattctgtgagaaatggcaaagtcctgactggccggggtaccaggggcatgattcagtgaaaaatggcaaagtcctgactggccggggtaccaggggcatgattctgtgaaaaatggcaaagtcctgacaggccggggtaccaggggcgagattcagtgaaaaatggcaaagtcctgacaggccggggtaccaggggcatcattctgtgaaaaatgacaaagtcctgactggccggggtaccaggggcatgattcagtgaaaaatgacaaagtcctgacaggccggggtaccaggggcgagattcagtgaaaaatgacaaagtcctgactggccggggtaccaggggcatgattctgtgaaaaatggcaaagtcctgacaggccggggtaccaggggcatgattctgtgaaaaatgacaaagtcctgactggccggggtaccaggggcgagattcagtgaaaaatgacaaagtcctgactggccggggtaccaggggcatgattcagtgaaaaatgacaaagtcctgactggccggggtaccaggggcgagattctgtgagaaatggcaaagtcctgactggccggggtaccaggggcatgattcagtgaaaaatggcaaagtcctgactggccggggtaccaggggcatgattctgtgaaaaatggcaaagtcctgacaggccggggtaccaggggcgagattcagtgaaaaatggcaaagtcctgacaggccggggtaccaggggcatcattctgtgaaaaatgacaaagtcctgactggccggggtaccaggggcatgattctgtgaaaaatgacaaagtcctgactggccggggtaccaggggccggggtaccaggggcaggttaaaccgaagaccataggaggctgagagactccctcagcttcgtatggtctatggttgttttcaaccatagaccataggaagctgagaggatccctcagcttccgtatggtctatggttgttcgtcaaccaaggaccatacgaagctgagggagtctctcagcttctatggtcctcggttggccccatctgcacacagtggtaggacttacagccacttccaatatggctagttgctaaaattagcactttctctgcttcagagcctgtgatcagtcccacacaggagtctcctttttgggcctcccgagcccgtcacgcaccggtcctttctcacggaggtccagtggaccccgagcttggaggtgggggcccgcacagccccccctccccccccagagagcgtctctcctccggacaagcagagctccgcacgcagcctccggactcctcgaccgaatggcaaccgcagcctgacatcggagggcccccgccgtccccggccccagcgccgggtagcggtcggtcggttcctccggccttcaggcccggctccacggcccccatcaccttccggcgcgagccgatcccctcggaagcgagaccgagccgccccgtctgtcccaacggtctctccacggagcccgccgccgtgcacgctgccccagcccgcgtgtcagctgccgcccgggcggcggtgcctccggaaagcacggtgtttctcgaatcctctgaaacggagctcggggtgccccccctggaccccgaaggcccgcactggtgcgttggaggggcggtggtgatcctccgggacccgccgctcctcctgctcgccgcaaaccgctcccgacccctgcggaggggctacctggttgatcctgccagtagcatatgcttgtctcaaagattaagccatgcaagtctaagtacacacggccggtacagtgaaactgcgaatggctcattaaatcagttatggttcctttgatcgctctaaccgttacttggataactgtggcaattctagagctaatacatgcaaacgaacgctgaccctccggtgatgcgtgcatttatcagacccaaaacccatgcggggtgctcctcgcgggcgccccggccgctttggtgactcaagataacctcgagccgatcgctggccctccgtggcggcgacgtctcattcgaatgtctgccctatcaactttcgatggtactttctgtgcctaccatggtgaccacgggtaacggggaatcagggttcgattccggagagggagcctgagaaacggctaccacatccaaggaaggcagcaggcgcgcaaattacccactcctagcagtatagcgtataccacgacctcttcgagtacccaactctcctccatccccggatggaggcaggggggtttaatgactccactcacccgccgtctgacggctgaggaggggagcgcccgaggaggcaatatggccgggtacccaactctcctccctcttctggaggggggcaggggggtttaatgactccactcaccagccgtctgacggctgaggaggggagcgcctgtgcattcgactcgtataggtacccaactctcctccctcttctggagggagtcaggggggtttaatgactccactcacccgccgtctgacggcggaggaggggagcgcctgtacacgtgaactctccaggtacccaactctcttcccaccgcaaggagggaggcaggggggtttaatgactccactcacccgtcgtccacggaccgcggaggaggggagcgccaggggaggcagaccggccgggtacccaactctcctccctccttggagggaggcaggggggtttaatgactccactcacccgccgtctgacggcggaggaggggagcgcccgagcacgagaggattgtaggtacccaactctcctcccccgggaggcaggggggtttaatgactccactcacccgcggtccacggactgtggaggaggggagcgcctgcaaacgcgaacgctccaggtacccaactctcctccccccgcatggagggaggcaggggggtttaatgactccactcacccgtagtccacggaccgcggaggaggggagcgccaggggaggcagaccggccgggtacccaactctcctccctccttgagggaggcaggggggtttaatgactccactcacccgccgtctgacggtggaggaggggagcgcctgagtacgagaatttatggctcaccaaaggtgtcgtggcatggatcagttcattgttgcctttccgggggggaaaggcaagggcgacctccgctggcggtgctggtgcatggacctacttagtaccctcagggagggtgattgtgtgctgggcgaccaactgcggctctggcggggagtgcagtcaggatcaaagggcgtaacacaggatgacggatcatcccggttgagtatggtgtgtctccagacatcagaggactacctcatccccaaccactggaacggggaccagtagggacgtttctctggccagctggagcaaattcgaacgagtaactatgacccccttaaggtctttgactgccggtggccaggggatagagccgtgtccagtaccgtgcccgagggtttgtggaaaatgcatggtcactagacctggtggctggggggggtacccggtttctaaacggggcaggtgccgggcgagcctgcccttgagactgatgtagcagtagttacctgctgccggcatgcagcagcccctgcggaggtgtgactaacccactatcccccagtaccttgggttacaaacaat

SEQ ID NO: 20591 - DNA, 93 bp, Xenentodon cancila
  source 1..93: mol_type = genomic DNA
gttgcgtggcccgggcgcctcctcgtggcgaccgctggatagggtgggaagtgctagctactacatcttctggcacaacccacctgaactaag

SEQ ID NO: 20592 - DNA, 125 bp, Schizopygopsis malacanthus
  source 1..125: mol_type = genomic DNA
caaagggcagtgtgggaagctggcctgagttgtatgcttaaacacatcacgggcctccacctcctcgtggtaacacctgggcaacatcctagcgattaggatggcgaagagaggctacccatgtg

SEQ ID NO: 20593 - DNA, 270 bp, Hoplias malabaricus
  source 1..270: mol_type = genomic DNA
gggctctgggggatagagcgccgttcagtaccgctcccgagggagcgggaaaatgcggcgtcactaacttcggggtgtgccttctgggggtcctcggccacaaaaagggggcagcagtgggcttgctgcccccccaggtcgaggagcagtagttacgtggttgtacctcctcgtggtcccgctggtaacggctctgccggctaaatcaacctgcccaaggatgagtacgtttgatcagctaactctggtatctctgatcacaaaaattcg

SEQ ID NO: 20594 - DNA, 471 bp, Schizopygopsis pylzovi
  source 1..471: mol_type = genomic DNA
gttgggaagaagcaatattggttgggaagaagcaatacctccacgtggtccaactggtaacactcaaactctgatcttcattgtgcgagtggctaaatttgcttcgtcttcctctgagagtgtgttgccctcgggcaaaaattttccgtccttgcgtagagtcattgttgtttcaattgacttttacactctcagggggcattttattattttaggtattataccatatctgctgtccgggacgagtctttacgagactgtgttgtgcgtcgccgaatatttttacaaattttgttattggccagtgcttttatttcgtgttgtgccttgcgggttgtgcgggttgtgcggtttgtggggttgtgcggttagtgccgttcgttctttgtgttgtgcggttcgtatttttggtgtcgtcttcgggcgtttttatatacatttattgttcgaattcaataaagtttcgttatc

SEQ ID NO: 20595 - DNA, 209 bp, Xiphophorus hellerii
  source 1..209: mol_type = genomic DNA
gggccatggggaatagagctccgttcagtaccgctcctgagggactgggaaaatgcggagtcactaccccatggtgtgccttctgggggtcctcggccaaggaaatgggggtagctgtgggcttgctgccccctaaggtcgaggagctgtagttacatgggtgtacctcctcgtggtcccgctggtaacggttcgccggctaaacaccc

SEQ ID NO: 20596 - DNA, 99 bp, Gambusia affinis
  source 1..99: mol_type = genomic DNA
catcgagggagcatcaacaacatagtccaccgagagacaatgtccccgaccaaggagatcaaatgtcaataggaccaacaaggatgaccgaagtggaca

SEQ ID NO: 20597 - DNA, 186 bp, Schizopygopsis pylzovi
  source 1..186: mol_type = genomic DNA
cttagttgctggagtagcactataattggattcaccgcctcctcgtggccccgccggtaacagaggtaatcctctggctgagtgtggatcctgctactcccaattttaaccttttaattagtgctgtgttgggtgcaggctaatctatcgtatcgatatggcagcctgtaacctatgtagcccaca

SEQ ID NO: 20598 - DNA, 64 bp, Eublepharis macularius
  source 1..64: mol_type = genomic DNA
gctgtcgactcaaatttgacgcctcggtacacctcggagggaggttatccctctataaagaacc

SEQ ID NO: 20599 - DNA, 495 bp, Gila orcuttii
  source 1..495: mol_type = genomic DNA
ctgtgagacgctggctctcagccagcgtctctcagtgatgacgtcacgttccaagatggcggcccccatgcagcggggctcggctcggctcggctctccaggctctccatgcgtctctggaccctttcggctatcaggtttgaacggctgcattgcctaagggtagtgagaggctgggttatcagtgaggtggggatgggcgtgagcctggtcgctaggggcaatcctcgccgagacctgagcccttttctccacgcctgttaaaacctgtggttatgctgactgggacccctcactgaggaaagcctctggtaagcacgtccaattgctccttttaagggagtattggtaaccatctggatggctggccgaattgctgtggacgtagttactctccccctggtaagggtagcctcccccaggcacgggtaagactccccctggtaagggtagcctcccccaggtacgggttactctccccctggtaagggtagc

SEQ ID NO: 20600 - DNA, 23 bp, Mauremys mutica
  source 1..23: mol_type = genomic DNA
gtgatataggacaatagtcatag

SEQ ID NO: 20601 - DNA, 192 bp, Ahaetulla prasina
  source 1..192: mol_type = genomic DNA
ggcgggagtaactatgactctgcctgagcactgcctctctttgtcatagttctccttaccgccttcgggtggtagcgtgatgaccgcgcctcctcgtggtgcgtgctggataagtaacctgcccgtgcaagagtgtgccgttcttgccactttgccgggtccaggtgaaaaactaaacgcggtcaccagcgg

SEQ ID NO: 20602 - DNA, 123 bp, Ascidia mentula
  source 1..123: mol_type = genomic DNA
ggtgcgttcccttgggaaaggaacaagagtcaatgtggccttgacctccacgtggtcccgccggaaacattgtcttgaattaaccttccagacgatggccaacaaggttaaagcactgattcc

SEQ ID NO: 20603 - DNA, 106 bp, Callorhinchus milii
  source 1..106: mol_type = genomic DNA
ttgctggttggtgccgatagagatccctccgcctcctcgtggccccgccgtaaacgagtgtatcactcggccaagagagggatcgcgccataccacccaaactatt

SEQ ID NO: 20604 - DNA, 257 bp, Phrynosoma blainvillii
  source 1..257: mol_type = genomic DNA
tggctctccatgcgtctctggaccctttcagttcctgagctcggacggttacattgcctaagggtagtgagaggatgggttattggtgaggtgtgagatgggcgtgagcctagccactaggggcaatctccaccaagatctgagcctttactccatgcctgttagagctcggggttatactgactgggacccctcatttgaggaaagcctctggattgcaagtccaaccgctacctccttgtggtgagagtcggtaa

SEQ ID NO: 20605 - DNA, 441 bp, Aldabrachelys gigantea
  source 1..441: mol_type = genomic DNA
tggctttccatgcgtctctggaccctctcagttccggctcggacggctgcattgcctgagggtagtgagaggagggtgatcagtgcgggggagatgggcgtgagcctggccaataggggcgatctcctccaagacctgagcctttactccacgcctgttagagcttggggttatgctgattgggacccctcatttgaggatagcctctggttagcaagtccaactgccacctcctcgtgttgagagtcggtaactggcttggatagtcaggcggaatgcggaggacggacccgcatcccttataggggtgcgggttgggatgggcaacccaatatttatgcccccctgttaagggtagcctcccccaggtacgggttagactccccctggtaagggtagcctcccccaggtacgggttagtttccccctggtaagggtagc

SEQ ID NO: 20606 - DNA, 175 bp, Aphelocoma californica
  source 1..175: mol_type = genomic DNA
aggccccttccctgcgtggttccatctggacagtggaattggtattgggtgggaggggttcattcgtcataccgcgtcttgcccatatttgggccataaattcggattcgaccaggtggacgggccacctttacttaacccggaaaagaaacatataatttatatgtttattaaa

SEQ ID NO: 20607 - DNA, 324 bp, Agelaius tricolor; identical to SEQ ID NO: 1877
  source 1..324: mol_type = genomic DNA

SEQ ID NO: 20608 - DNA, 362 bp, Ammodramus caudacutus
  source 1..362: mol_type = genomic DNA
gtagtcactctgcactttctgtaacttgcaccggggtgtgggacgtgggtgtgggatgtgggttgtgggtgtttttaataggggggggtgatttctttgtagaattgtctatttattgtatgcctatctttttaataaaaagacggtagctatgttcgcaaagcagccacaagccactagccagttaggtagcttcatagtgggtaggtgacaggaacttttgactcagaacgcgtcctttaacatctattatggaccactttaaccggacatgcaccgattaaccggatttgtccaaggtggacgggccacctttacttaacccggaaagggaacatatattattatatgtgttcgaaaaa

SEQ ID NO: 20609 - DNA, 358 bp, Geothlypis trichasfixed
  source 1..358: mol_type = genomic DNA
atggtttggcgagaatactcagttgctaaccgccctcggtctctctaaaacaaggctagagagaatcgcacagggccctggcatccaaagtactctttgcctctgtagatattgtacatatttttgttagcaaagctagatcgattttacctatgtaatcatgtatcaataaaattaggcccctcccctcagcgggttcgctggacagtggaatcggttctgggtgggaggggctcatccgtcataaccacgtttagcccatatttgggcaataaattctgatttggtcattcaggtggacgggccaccttacttaacccggaaaaggaacatatatgatttgtgtatgtttattaaa

SEQ ID NO: 20610 - DNA, 361 bp, Ammospiza nelsoni
  source 1..361: mol_type = genomic DNA
gtagtcactctgcactttctgtaacttgcaccggggtgtgggatgtgggtgtgggatgtgggttgtgggtgtttttataggggggggtgatttctttgtagaattgtctatttattgtatgcctatctttttaataaaaagacggtagctatgttcgcaaagcagccacaagccactagccagttaggtagcttcatagtgggtaggtgacaggaacttttgactcagaacgcgtcctttaacatctattatggaccactttaaccggacatgcaccgattaaccggatttgtccaaggtggacgggccacctttacttaacccggaaagggaacatatattattatatgtgttcgaaaaa

SEQ ID NO: 20611 - DNA, 301 bp, Lichenostomus cassidix
  source 1..301: mol_type = genomic DNA
ttatgacttgtttttgaatctgttgcatgtttttgaacctgttgcttgttcttaaactgttgtaactttttttctgtaaccagtttacattatttctaaataaaatttcggcgggttctagggacgcagggcagccacaagccagaaggtcgcacatagtaagtagggacaggacagaatattttcataacgcgtcaattaccacctaacttggaccaatctaccggatttggccaaggtggacgggccacctctacttaacccggaaaaggagcatatagaaatatatgtactcgaaaaa

SEQ ID NO: 20612 - DNA, 356 bp, Oenanthe melanoleuca; identical to SEQ ID NO: 1353
  source 1..356: mol_type = genomic DNA

SEQ ID NO: 20613 - DNA, 346 bp, Serinus canaria
  source 1..346: mol_type = genomic DNA
agtaggattttttatttgatattatgtatgttttataccttgtacttttgttttttatattgtattggggggattttttgtagcatgggattgtttttattgtatgacctttttgatattttttaataaactagacggtagctatgggggttagggcacgccacaagccagttagggcgctcatagtgagtagggacagtaattttaattcacaacgcgtcaattaccatctgattcggaccaatcttacctgacttgtactaagttaccggatttgtcccaggtggacgggccacctttacttaacccggaaaaggaacatgtattttatatatgtgttcgaaaa

SEQ ID NO: 20614 - DNA, 275 bp, Phylloscopus trochilus; identical to SEQ ID NO: 1883
  source 1..275: mol_type = genomic DNA

SEQ ID NO: 20615 - DNA, 272 bp, Erithacus rubecula
  source 1..272: mol_type = genomic DNA
ttgtattattgtatttttgcattttgttttgttatatgctttaattaaaaaaaaaaaaaaaaaaaaaaaaaaaaaaaaaagacggcagctagggacgtaggccagccacaagccagttaggtagctgatagtgagtagggacagaactttttatttcataacgcgtcaattaccacccgaactggaccaatttaccggatttgtccaaggtggacgggccacctttacttaacccggaaaaggagcatatatttttatatgtgttcgaaaaa

SEQ ID NO: 20616 - DNA, 190 bp, Melospiza georgiana
  source 1..190: mol_type = genomic DNA
ataaacaaggcccctccccttggctgggtccgctggacagtggaatcggttttgggtgggaggggttcatccctcataaccgcgtcttagcccatatttgggttaaaaattctgatttggacatcaggtggacgggccaccttacttaacccggaaaaggaacatatacagtttgtatgtgtttaataaa

SEQ ID NO: 20617 - DNA, 358 bp, Geothlypis trichas
  source 1..358: mol_type = genomic DNA
atggtttggcgagaatactcagttgctaaccgccctcggtctctctaaaacaaggctagagagaatcgcacagggccctggcatccaaagtactctttgcctctgtagatattgtacatatttttgttagcaaagctagatcgattttacctatgtaatcatgtatcaataaaattaggcccctcccctcagcgggttcgctggacagtggaatcggttctgggtgggaggggctcatccgtcataaccacgtttagcccatatttgggcaataaattctgatttggtcattcaggtggacgggccaccttacttaacccggaaaaggaacatatacgatttgtgtatgtttattaaa

SEQ ID NO: 20618 - DNA, 325 bp, Phylloscopus trochilus
  source 1..325: mol_type = genomic DNA
tttgtaattaggagtagtttatttatgtttttctctttttttgcaatttctctcttgcttattgttttgtatttttgcatttctctgtattgcttttgtatgtttttaaaaaatttaaaatttttcaataaaaagacagtagctggggcgtagggcagccacaagccaggtaggtagctcatagtaagtagggacaagtatcttttttcataacgcgtcaattaccaaccggactggactaaattacctaatttgtccaaggtggacgggccacctttacttaacccggaaaaggaacatatattatttatatgtgttcgaaaaa

SEQ ID NO: 20619 - DNA, 330 bp, Anniella stebbinsi
  source 1..330: mol_type = genomic DNA
ctcaagctcaatttggacgacccctaaattttaatcctaattttaaaagctttttaatcttccttttaaaaattaaaatttgttgtatttttacaaagaaattttgtttctaattggcttatttttaaattttagtttaggtaggttgacatgtcgggagcttgtgatgattataccaaaccctggtcaaaggctaacaccaacatggtctgaggccaggtgtcatgctgcgttaattggattgactgaccttaaatcgatggacgggccatcaaggggctggtcaccccttactaacgcgaaataagaggcttccccctcaaacttcaa

SEQ ID NO: 20620 - DNA, 149 bp, Ascidia mentula
  source 1..149: mol_type = genomic DNA
gttgtagaccaatgactgtgggcacgcacccgagagtatactccatctcagagggggctccggccccatactctgaatatgcgaaacgacttgtgcgcttcatcgctcacggttcattgtgccatgacgcgagagtgctcagtcaaaca

SEQ ID NO: 20621 - DNA, 190 bp, Crotalus oreganus
  source 1..190: mol_type = genomic DNA
gactaccgagcgccaccggaggggacccagaggaccgtctcggtgattaggcggtgaccgccctggcctctacctgaaatagcgatcaaatcgccttagagggcctgatttggggggttgggcagacactctgtgtcattactgccctttacctttccacttcttgcctgtctaataataaatgttaaca

SEQ ID NO: 20622 - DNA, 123 bp, Gopherus flavomarginatus
  source 1..123: mol_type = genomic DNA
tgattacattcatactaattcatgatcgcgatcactggacaaggcaaccagggttggacgggccacccggggtttggaacaccccaaataactcgaaacagaaacccgcgtgggtttgttaaa

SEQ ID NO: 20623 - DNA, 105 bp, Malaclemys terrapin
  source 1..105: mol_type = genomic DNA
atgattaaaatctcaataattcatgaccgcaatcactggatgggactttctgggttggaacaccccgaataactcaaaacaaaaacccgcgtgggtttgtaaaaa

SEQ ID NO: 20624 - DNA, 348 bp, Eublepharis macularius
  source 1..348: mol_type = genomic DNA
atttggagattgttggctacgaagtgcagccctattttaaatcttttattcttttaataaatttagttttaatttggtagttttattcaaattctttgtttgggcatgtctaaattcatatgtggcaatatagggagcctctcttgctgcggacaagcccaggcaatgtgggaatcttgtaatgattactattgagcaacatgcacttaaaatcgtggtgcttgtaagctctcatgacgcgatcaccggtgaatgacatggtctttaactataaatggacgagccattgggatctgaccagtcccactaactcgaaagagagagcttcggctctagtataaaaatacc

SEQ ID NO: 20625 - DNA, 110 bp, Ascidia mentula
  source 1..110: mol_type = genomic DNA
tgcatagcccatgcgtcaatggtagagggtacgcaccctcagagaaacaacatttcctctctggaaatgcgaaatgacccaggatgatgaacgtagttctgatgggttca

SEQ ID NO: 20626 - DNA, 545 bp, Eublepharis macularius
  source 1..545: mol_type = genomic DNA
tcagtagatatgctgaatacctttttgaattcctgactggctgttcgtgggaaaatgggtaaccctaatccagagagggaggaccaaacacggctgtacagcgacttggatccacccgaaccagtcttaatttggagattgttggctactaagtgcagccccattttaaattttatttctattttaataaatgtattattatattatgtaattaagtggatagattgtccaaatttctctcgtttgggtacgtctaaatttaaatgtggcaatttaggtagcctctcttgctgcggacaagcccaggcaatgtgggaatcttgtaatgattacttttgagctacaggcacttaacatcatgatgcaggcaagctctcatgatgtgatcaccggattatggcatggtattaaactgtagatggatgagccattgggacgcgaatacaggaatgacatggtctttaattgtggatgaaccagccattgggacctgaccagtcccactaattcgaaagagagagctttgactctagtcaaaattagcc

SEQ ID NO: 20627 - DNA, 301 bp, Ciconia episcopus
  source 1..301: mol_type = genomic DNA
ctcaattatctattgggtcacgagccgcgggaataccatgtaaattgtattttattattgattatcaataaagtgacaaccccctatccatcaggtgggagggacccctagagactgcctagacagacaaaagcttgtgtcagggcgctaatagtatgtaggactttatgggactcgaatcatgacgcgtcatcaacccggccttaagacactaattaccggtctttacccaggtggacgggccacctttacttaacccggaaaagaaacatgtatatttattatatatgtgtttgttaaa

SEQ ID NO: 20628 - DNA, 475 bp, Ciconia stormi
  source 1..475: mol_type = genomic DNA
ggaaaacggcaccctggaaactatgcattataaaagaacttgggctctcttcctccagacaggacaaagttgctcggcgcctatcaaatcgagcattgttctcttcagtcgacataatacacgtttgccagcaaaacaaggaccattactagatcggcatgactcaattatctattgtatcatccattgtgtcatgagccaggggactatcatgtaaattgtattctataattgactatcaataaagtgacaactcctctatttatcaggcgggaggggccccgagagactgcctagacagacaaaagcttgtgtcagggagctaatagtatgtaggactttgtggaactcggatcatgagcgtcatcaaccccgcctaaagacattaattactggtctttacccaggtagacaggccacctttacttaacgcggaaaagaaacatgtacatttactatatatgtgtttgttaaa

SEQ ID NO: 20629 - DNA, 240 bp, Gallinago paraguaiae; identical to SEQ ID NO: 1346
  source 1..240: mol_type = genomic DNA

SEQ ID NO: 20630 - DNA, 260 bp, Garrulus glandarius
  source 1..260: mol_type = genomic DNA
gcagctctttattgttttgtagttaatttcctctgtattatttcatagcatgttttcaataaagtttcggcgggggctagggacgcagggcagccacaagccagaacatcgctcatggtaagtagggacaggacggaacttttcataacgcgtcaattaccacccgatttggaccaatttacctgatttgtccaaggtggacgggccacctttacttaacccggaaaaggaacatataatttttatatgtgttcgaaaaa

SEQ ID NO: 20631 - DNA, 138 bp, Aquila africana
  source 1..138: mol_type = genomic DNA
tttaatgtgtctcatgtactgcttacttgtaatgtctattagcgactttgttcgccttagggagtctgtgtgcggggtggggggcccttgatgggattcctattcttgtatgctgactgtctaaaaataaatgtttcc

SEQ ID NO: 20632 - DNA, 435 bp, Falco fasciinucha
  source 1..435: mol_type = genomic DNA
gggacccctgcggcgtggcggcggccactcgtttgttcatttggtagtggactcggaccggacctgcagggcgtaacaaccctccgtttattttttcgttttgttccgtgactgtacttgtgacttcgcgtgcgcgtcgaccttccgcgtggatcttcctcccttcgcgtgtctatcgttgcggctggcccagggcagtcgtgccctgaagccacacagccccgctcattgctcacttggattagccaatctgaccgggacgccattaccgcgggtatgtccggcttactccgatgtatccggaccgaagaatcggagttcatggtagattagagagttgttgatctgacatgcgcgtcgctatttgacgtacagtgggaccacccacgttaaagaccaggtaatgacgggtctccgaaaccagtcaacgtcatc

SEQ ID NO: 20633 - DNA, 363 bp, Otis tarda; identical to SEQ ID NO: 1864
  source 1..363: mol_type = genomic DNA

SEQ ID NO: 20634 - DNA, 205 bp, Erithacus rubecula
  source 1..205: mol_type = genomic DNA
ataaacttgtttaaacttgttggcccctacccagctgtcggttacctagacagtggaattggttttgggtgggaggggttcatccttctatcgcgtcttgtaccatcacccagatttgggtccaaatttctgatctggaccaggtggacgggccacctttacttaacccggaaaaggaacatataatttttatatgttcattaaa

SEQ ID NO: 20635 - DNA, 153 bp, Acridotheres tristis
  source 1..153: mol_type = genomic DNA
gaattggtttgggtgggaggggttcatccttcataaccgcgtctggcccatattacaacttctgggccccaaattctgatctgaccataggtggacgggccacctttacttaacccggaagagaaacatataattctttatatgtttattata

SEQ ID NO: 20636 - DNA, 250 bp, Aphelocoma californica; identical to SEQ ID NO: 1352
  source 1..250: mol_type = genomic DNA

SEQ ID NO: 20637 - DNA, 196 bp, Cichladusa arquata
  source 1..196: mol_type = genomic DNA
taaacttgtcggccccttcccggctgtcggtgacctggacagtggaattggttttgggtgggaggggttcatccttctatcgtgtcaatttaccatcacccaaactttgggtccaaaattctaatctggaccaggtggacgggccacctttacttaacccggaaaaggaacatataatctttatatgtttattaaa

SEQ ID NO: 20638 - DNA, 208 bp, Xenus cinereus; identical to SEQ ID NO: 1347
  source 1..208: mol_type = genomic DNA

SEQ ID NO: 20639 - DNA, 362 bp, Chamaetylas choloensis; identical to SEQ ID NO: 1354
  source 1..362: mol_type = genomic DNA

SEQ ID NO: 20640 - DNA, 328 bp, Cichladusa arquata; identical to SEQ ID NO: 1879
  source 1..328: mol_type = genomic DNA

SEQ ID NO: 20641 - DNA, 349 bp, Myiozetetes cayanensis
  source 1..349: mol_type = genomic DNA
gtaagtgtgtattttatttaagtatttttatttaagcatgcttatctttagtgcaattgtattaaccttagctttatttttagtgcatttatagttataattttgtgattgtaatagtgtttgtattttaagttttcaataaagacagcgaccgctagggtgtagggccgccacaagacagttagagtaggctagatagtttgtagggacttgaatgtgggacttaactcatgacgtgtcttttaccaccgattttgggccaaatctttaccgattttgaccaaggtggacgggccacctttacttaacccggaaaaggaacatatattaattatatgtgttcgtaaaa

SEQ ID NO: 20642 - DNA, 176 bp, Prinia subflava
  source 1..176: mol_type = genomic DNA
ggccccttccctgcatggtgagatctggatagtgggaattggttttgggagggaggggttcatcagttcataacgtgtcttgccctttgtgggctacaaattccaatctggtcaggtggacgggccacctttacttaacccggaaaagaaacatataattttatatgtttattaaa

SEQ ID NO: 20643 - DNA, 282 bp, Cossypha archeri
  source 1..282: mol_type = genomic DNA
gtattgttttcttgtttttaatttttagtatagtatgttagttttttagttttatggttttattgtagtgttattattgttgttttattgtgtagcatgttatgattttaatgttatgattttaagattgttattaaaggctgtgcgtttcgatccccttccccaaaagtggcgaatctcgtgatgattacaatctaagcgcgatcaccggatatgacgatggtggacgggccacctttacttaacccgtaaaaggtgcacacctcgtgtgtgttcatataa

SEQ ID NO: 20644 - DNA, 193 bp, Cossypha dichroa; identical to SEQ ID NO: 1878
  source 1..193: mol_type = genomic DNA

SEQ ID NO: 20645 - DNA, 369 bp, Geranoaetus albicaudatus; identical to SEQ ID NO: 1340
  source 1..369: mol_type = genomic DNA

SEQ ID NO: 20646 - DNA, 372 bp, Harpyopsis novaeguineae; identical to SEQ ID NO: 1339
  source 1..372: mol_type = genomic DNA

SEQ ID NO: 20647 - DNA, 392 bp, Melierax canorus
  source 1..392: mol_type = genomic DNA
ttatctatactgttctgctttatatattgtttctgctgtattactatatgttgttttattgtaattattgttttgtttcatattggtcttgctctgttatatattgctcttgtcgcatggttacttattgttttgctgtgttactatcaattctttaataaaactacccctggtactcctgctctgttaccttggcactggaaaggtcgagacagtaagttggaactcgtattcatgacgtgtcacattcacctaaatttacacaaaatactaattggacttgtcaaaattttctaccaaattggacaattttaccggattggacataggtggacgggccacctttacttaactcggaaaagaaacatatataattttatgtgtttgttaaa

SEQ ID NO: 20648 - DNA, 210 bp, Scolopax minor; identical to SEQ ID NO: 1345
  source 1..210: mol_type = genomic DNA

SEQ ID NO: 20649 - DNA, 232 bp, Limnodromus scolopaceus; identical to SEQ ID NO: 1344
  source 1..232: mol_type = genomic DNA

SEQ ID NO: 20650 - DNA, 267 bp, Myiozetetes cayanensis
  source 1..267: mol_type = genomic DNA
gtaatcttttattgttttattgttattatagtattttagtttttatagttttaatgtttagatatgttatgtttttatttcttttattgtgtggttatgttatagttttaaagttcttattaaaggctgtgcgttttaacccccttccccccagtggagaatctcgtgatgattacactctaagcgcgatcaccggacatgacgatggtggacgggccaccgttacttaacccgtaaaagggacacactctgtgtgtgttcgtataa

SEQ ID NO: 20651 - DNA, 290 bp, Acrocephalus scirpaceus; identical to SEQ ID NO: 1876
  source 1..290: mol_type = genomic DNA

SEQ ID NO: 20652 - DNA, 192 bp, Chamaetylas fuelleborni; identical to SEQ ID NO: 1880
  source 1..192: mol_type = genomic DNA

SEQ ID NO: 20653 - DNA, 304 bp, Tyto alba
  source 1..304: mol_type = genomic DNA
ttgtatcatcacattgtagttgtaatatctgtgcactgtattacttttaattaataaaataaagtggtatgaagagccgacatggaaggatcgtgggggggttagatcaggagagaaaacgatcagagtattgggatttcaacatagtaggtgggaatcttgttctttttatgacgcgtctcaaccgaaattgacattaacaattggacttgacaaaatttttcaccaatttggacccaggtggacgggccacctttacttaactcggaaaagaaacatatataatttatatgtgtttgataaa

SEQ ID NO: 20654 - DNA, 184 bp, Buteo platypterus
  source 1..184: mol_type = genomic DNA
tttgctttgctttgtattgtctgtatgacgttgacgttgttgtctaatagcgggcgaccgccttgaaaggggaggcgggcggggaaggtacaaatatatgtatatatgtgtaagttttgacatccctatacattgctgtaacctgtaactgtcttgttttgccttttcaaaaataaaatgtgac

SEQ ID NO: 20655 - DNA, 204 bp, Setophaga kirtlandii
  source 1..204: mol_type = genomic DNA
tttgttattaataaaatttaggcccctcccctctgtggttgctggacagtggaattggttttgggtgggaggggttcatccatcataaccatgtcgtgcccatatttgggcaataaattctgattggactatcaggtggacgggccaccttacttaacccggaaaaggaacgtgtacattttgtgtatgtttaattaaatagcc

SEQ ID NO: 20656 - DNA, 266 bp, Colaptes auratus
  source 1..266: mol_type = genomic DNA
gacaccctggccgtaagactcctttgaaaccatatgaaggtgcacatggacctattccggtctatgtaacaaacaccagatggtggattaggagcagccttaacttatcagtggaatctcgtaatgattactagcctcatgacgccgtcacataccgatgaacgacatctaatcggtaatgccgacttcccccggctatgaccaaatgggtggacgggccaccctcacttaacccggaaagtaacatacctcggtatgttcgatac

SEQ ID NO: 20657 - DNA, 125 bp, Emys orbicularis
  source 1..125: mol_type = genomic DNA
aggattacaatcacaataattcatgaccgtgttcactggatgggacaatatgggttggatgagccacccggggtttggaacaccccaaataactcaaaacagaaacccgcgtgggtttgtaaaaa

SEQ ID NO: 20658 - DNA, 266 bp, Aldabrachelys gigantea
  source 1..266: mol_type = genomic DNA
agatcccggagtttccattccgtgtatcttgccatagctataatttgctagattggtttttagctttttagtctttttgtgctattactacctgtcctggtagttgattttaagatttaataaatgcttaattaagggctattttatgtctatttttaaattattaatggctatggatttttttagttaccttatcggacatggatgcggactggccgcaaagtaaccaggaaagggcaggtagtcacgcctgtacatgaatagcc

SEQ ID NO: 20659 - DNA, 124 bp, Caretta caretta
  source 1..124: mol_type = genomic DNA
tgattacatcaaaaactaattcatgaccgcgatcactggacaggacaaactgggttggacgggccacccggggttcggaacaccccaaataacccgaaaaagaaacccgcgtgggtttgtaaaa

SEQ ID NO: 20660 - DNA, 540 bp, Pleurodeles waltl
  source 1..540: mol_type = genomic DNA
ccattcacaacactgcattacacgtacacctacacctacactatctatctatctctttttcctacactgctttagaatgctcacacctattaatgtacacatgttttcttcctaattccttataaagtttatatttacaaatagaagtgaaatagttaacaatacagttgatgttagtattagaaatagttttatatttatatatatacatgtgtttgagtgtgttcattctatcatagcttctatgctatctagtgtgtggttagaatagataattgcctacacataatcagtatgaatcgtagaaatgataattgctaaattttgcgaagatatagacaataaatatattattgttagagcaatactgtagcgtgtactgtctctatttactatgtgattcccgttctagtggggacagtttgtatgtaactgttctccggaacaatcattgtgttgttggaaccgtaaccgatttgacgctgatgggcagcaataataacccagaatgagccaccgcgaagtggtacaggaatagcc

SEQ ID NO: 20661 - DNA, 167 bp, Pseudolycoriella hygida
  source 1..167: mol_type = genomic DNA
atgaagctagcgttcaagcttaacttagggacaggtttgctaggaatttccaatttatgcgcgtaatggcgttaaaaactgattataaaggccaaaattcctataatatatggtgatgttcaagtgatgatgaggcataacctcattctgatgacatcaccggctaa

SEQ ID NO: 20662 - DNA, 722 bp, Andrena bucephala
  source 1..722: mol_type = genomic DNA
gaacaagttttctcctttttttttttttttttttttttttttttttacgtatgtgaccaggtgggctgacctaccgggaagccaaatgtgattgtccatatatgtggaccaggccccggagcggaagagcaccatgcgtacgtacatggtgaccgcccgggccggtaaattataatgttaatgtcccacttgacaaacggaggagcggagtagcaccgtgcgtacgtacacggtgaccgcccgagcccgaatgcatatatgttcgaccaggcttggagcggactagcaccatgcgtgggtacatggtgaccgcccgagccagtaaattatgcatgatgttttataacgaagcagctgccgctgatttatgtagagtagcccgcctggcctttacaccagacggtgcgagtcatgaccactattgtgggacatggcgcggagcgggcgactacgagcagtagaagcccgggcgacgccttcgcgtggctttccctgaacacgattatcgtgaccaagttcgcttcccccaagggggactccgttcctagtttttccaggctcgtgtggcagagccctgggtagtgagcgctagaaagtggaatttgttaaagttaaatagaattgttattggcctcaacttgagaccaacttgacgcctcacgaggtggcgattgaaaccctcggaagtatccggccgccctcgggcgcatccggacagattt

SEQ ID NO: 20663 - DNA, 209 bp, Brachypalpus laphriformis
  source 1..209: mol_type = genomic DNA
catgggttcaacgctgaatctatgctgcgcaaagggtaccacctccatataagtggaaatacagcggaagatccagaatcaacaacttgccttaagcaaaaaaaaaaaaaaaaaacaaacaacaaaaatcatttgtattcatttgtataatgtatataaaaatattgcttaataaactggccgactggctgactggccgcttaatgttc

SEQ ID NO: 20664 - DNA, 162 bp, Acrocera orbiculus
  source 1..162: mol_type = genomic DNA
attctgaggtgggtagcgttgccgaacacctcaacgcaaacagagctcatggtttcaatgacttattatatttttattaatattaaattataaattttgtttagttaagtctttattgtaaccaacatttttcaataaattattatatgggcgcagccttac

SEQ ID NO: 20665 - DNA, 124 bp, Acrocera orbiculus
  source 1..124: mol_type = genomic DNA
aatattatgtgaggtactactgcctgggtccatcacagtagaaatgcatccttaattttatattttaattcttgtaaaaatttgtaaacatttttatttttgaaagttaataaaggaaattgta

SEQ ID NO: 20666 - DNA, 160 bp, Brachypalpus laphriformis
  source 1..160: mol_type = genomic DNA
cggaaaccacatataggtacggctgccaacattcagccgaaaacagcaacagaagccagcacttttattaaataccttgtcatttatattgtactcactaaactgtatatattcaataaggttcaataaaaatgcactcagcgattgttgctgcagtgaa

SEQ ID NO: 20667 - DNA, 278 bp, Andrena bucephala
  source 1..278: mol_type = genomic DNA
gtgcaagtgtgcgtgagtcagtgtgcgaatgtgccatgtatctttgtattattttgttcgtcttgtttgtatgttaatcgcgttttcacattaattttccatcgtattctttctctttattagcttattcatatatatagattctatagtattgaaatccagatttagttatatctgcaatataaatcctttaatagcctaccagttgggccttctagtaaaatagtcgattaatacactggacaaatgttgtattttccaaaatataatatgtttca

SEQ ID NO: 20668 - DNA, 197 bp, Acrocera orbiculus
  source 1..197: mol_type = genomic DNA
agatgtagctggtcatctataacaagggggtgctgccgccccggtaaaagtggcataaagagagtgaagtttttagttggtgagagtccaacagtatcattgttcgttgtctacgttgtgaacaatggtctgcataatgcattttcttcacttggattaaaaaaaaaaaaaaaaaaaaaaaaaaaaaaaaaaaaaaa

SEQ ID NO: 20669 - DNA, 231 bp, Acrocera orbiculus
  source 1..231: mol_type = genomic DNA
tggtcaacgctggccacattattaagggactccagccctacaacatcttaagtccgcactggataataaagcggccgcctagttccgaactgccatgaggccagggctaggtgagagttgggtttaggtttagtgggtgcaagccccacacttacctcagatgaggtgtgcgttaggcattccccccaactataaaaaaaaaaaaaaaaaaaaaaaaaaaaaaaaaaaaaa

SEQ ID NO: 20670 - DNA, 230 bp, Acrocera orbiculus
  source 1..230: mol_type = genomic DNA
cgtctgactgtacgtattctagacaggagactccagctcctagcatctaagtccgcactggataaagaagcggccgcttagttcgaactgccatgagggccagaactaagagagagttgggtttaggtttagtgggtgcaagccccacacttacctcggacgaggtgtgcgttcaggcattccccccaactataaaaaaaaaaaaaaaaaaaaaaaaaaaaaaaaaaaaa

SEQ ID NO: 20671 - DNA, 224 bp, Meliscaeva auricollis
  source 1..224: mol_type = genomic DNA
taccaacatcatctatacgataatcaaattgaacgaatcatccgacgagttccaactttgagggtactactgccgccacccagtagaaagaggatatcagcgttaacacctatcagtttagatttaatatttgtaatttatttttgtactagtatttaagtattttttaatgtatagatctgaaaataaatgactgtcctggctgaccagtccgcactttattc

SEQ ID NO: 20672 - DNA, 227 bp, Meliscaeva auricollis
  source 1..227: mol_type = genomic DNA
ctgctctagcgttaataacaatcgggtgattcttcggagtagccccatacacaacaggtactactgcctcacagtagcaaaaggattacagcatcaacacctgcattcaacatctatatatataaataaatatgtacaatatgtattttattatttaagtatttttttaatgtcatagataagataaaataaaagactgccctggctgaacagtccacattgtattc

SEQ ID NO: 20673 - DNA, 208 bp, Mauremys mutica
  source 1..208: mol_type = genomic DNA
ggttctgtccctcatgtgtcttgaattttctttctacatctttttcttatccatactatatacctatcctttttcttgggaatctcgtgatgattattataattcatgaccgctcactggctatgacataaccttggttggatgggccacctggggtgtttatactctccaaataactcgaaaaagaaacccatgtgagtttttaaaa

SEQ ID NO: 20674 - DNA, 144 bp, Drosophila sulfurigaster
  source 1..144: mol_type = genomic DNA
caccgaggtttactttcctcattgaaagtcaactacactggccaacatctattgtgtacaaagtaaagggaaaacagtcatatgacgtgccatccatatatggcattgttgtgtgcaaaaattcatttcctacaaaaaatagcc

SEQ ID NO: 20675 - DNA, 253 bp, Rhopalosiphum padi
  source 1..253: mol_type = genomic DNA
ttcctcgcctacccgcgacaacattgatggtctcctcttccatcaccttcctttatgattccacttaatgaccttcctctccctcagacaacttccacttccacctccgggtaggcggtatatgatgatagcccgggtcttaccctggttaccattattttctctctctctggctaatcaaaggggtaagattcggcgccttaggcgtattgcggctgataaccgttttacgtacgggtacctttctgataca

SEQ ID NO: 20676 - DNA, 200 bp, Nemotelus nigrinus
  source 1..200: mol_type = genomic DNA
aacgggagtcgcccaattgtaaaactagggccacccatcccctaacagcttagatggaggaatatagcgggcggtttagtgggtcgatccccacacacgcgaggccgtcaacccacgttacagggatggcctcgtaggcgttacaaatgagaggagaacgttcctacccgcttcaaaaaaaaaaaaaaaaaaaaaaaaaa

SEQ ID NO: 20677 - DNA, 108 bp, Acrocera orbiculus
  source 1..108: mol_type = genomic DNA
aacagaggagtggtactactaccagaacatcattagtagaaattttttcctttaattacttttatgtatgttgtataaacattttattttgaataaaggatattttta

SEQ ID NO: 20678 - DNA, 168 bp, Chlorops oryzae
  source 1..168: mol_type = genomic DNA
actctctttctctcagctaatattttgggtgacatcttcccggtgaagaaggtgcaaaatcggtggaggtttttagtgagtaagaatctcacactacccactcgaccgcctgtcgaggggtgcctatgtaaggttttcctccacgtgacaaaaaaaaaaaaaaaaaaa

SEQ ID NO: 20679 - DNA, 622 bp, Andrena bucephala
  source 1..622: mol_type = genomic DNA
tatctctggtaccccccaaatatgtgtcatgtatgtctgtacgtgtgtgattgtctagaccaggcacggagcggagcagctctgtgcgtttgtacacagagaccgtccgtgccagtatttataatgtgatggttgacgcttgaacatattgaccaggcatgaagcggaacagctccgtgcgtatgtacacggagaccgctcaagccagtatttattggtatacgtccggaacgcaattgacgaagcagctgccgctgataatatattatgcagtcaagcccacctggcactttacaccaggtggtgcgagtcgtgcccactattgtggtgaacggcgcggagcgggtgaatacgaagagtaggaacccgggtgataccttcgcgatggttttccctgagcacgttacacgtggccaaattcacttccccaagggggactccgtttcctaatttttcgaagcccgtgaggcagatctcttggcagtggaagcaagaaagtggaatttgttaaagttaaaaattattgttattggtaccagtcactgggccaactcacgtctaacagggtggcgaaccaaacccctggaaatattcggccgcctcggcgcatccgaacaggttc

SEQ ID NO: 20680 - DNA, 202 bp, Mauremys reevesii
  source 1..202: mol_type = genomic DNA
ggtcctgtccctcatgtgctgaatttcttttctaacctatctcttatccaaactatatacccaccccaccttttcatgggaatctcgtaatgattacaataattcatgaccgctcactggacacggcaactctggttggatgggccaccaggggtgtacactccgaataacccgaaaaagaaacccgcgagggtttttaaaa

SEQ ID NO: 20681 - DNA, 136 bp, Aspidoscelis tigris
  source 1..136: mol_type = genomic DNA
tgatctgctttcccaagtggtgactaccctgcaagtttattgtcaaagcgttagccgcctcggagctcattacgttactatggcctgcattgggctcgccaaaatgtaacgactgactctgataatatatgacacc

SEQ ID NO: 20682 - DNA, 166 bp, Aspidoscelis tigris
  source 1..166: mol_type = genomic DNA
agccggtgtcgcatgtaggttactgggaacagctcatgacccgccacaagcggcgatccccctgcaacgtcgttatcattagcggttatccgcctcaaggctaccgtttgcggtagtgtaattgttacattgctgctgtcggttgaccttgataatccatgacacc

SEQ ID NO: 20683 - DNA, 120 bp, Mauremys mutica
  source 1..120: mol_type = genomic DNA
tgattacaataataattcatgaccgcgatcacaggatgggactaacagggttggacgggccacccggggttcggtacaccccaaataactcgaaacagaaacccgcgtgggtttgttaaa

SEQ ID NO: 20684 - DNA, 117 bp, Mauremys reevesii
  source 1..117: mol_type = genomic DNA
tgattacaataattcatgaccgcgatcacaggatgggaccaacagggttggacgggccacccggggtttggtacaccccaaataactcgaaacagaaacccgcgtgggtttgttaaa

SEQ ID NO: 20685 - DNA, 141 bp, Aspidoscelis tigris
  source 1..141: mol_type = genomic DNA
cgggaggccgggagcgagatatgacctacttgatgtggcgatgttcccctctgtgtagttgtcactagcggttcgccgcctcaaagttttgtattgctgtaactctgttgctgtaatggagactttgataataaatgttaa

SEQ ID NO: 20686 - DNA, 125 bp, Actinemys pallida
  source 1..125: mol_type = genomic DNA
atgattacaaaaacaataattcatgaccgtgttcactggatgggacaatctgggttggatgagccacccggggtttggaacaccccaaataactcaaaacagaaacccgcgtgggtttgtaaaaa

SEQ ID NO: 20687 - DNA, 148 bp, Aspidoscelis tigris
  source 1..148: mol_type = genomic DNA
gaggatggaagcagctcatgacccgccacaagcggcgatcccccttcatagtcgtcgtcgatagcggttatccgcctcaaagtttactgtatgctgtatttctttgttatttactgctgtacggtctactttgataataaaatgataa

SEQ ID NO: 20688 - DNA, 209 bp, Mauremys reevesii
  source 1..209: mol_type = genomic DNA
ggttctgtccctcatgtgtcttgaattttctttctgatatctttttcttatccatactatatacctatcctttttcctgggaatctcgtgatgattattataattcatgaccgctcactggctatgacaaacctttggttggacgggccacctggggtgtttacgcactccgaataactcgaaaaagaaacccatgtgagtttttaaaa

SEQ ID NO: 20689 - DNA, 270 bp, Mauremys mutica
  source 1..270: mol_type = genomic DNA
catcaatggaatataacaaacacctttgaaagcattggaaaaaacaataaaaacactgttccatgaggtcctgtccctcatgtgctgaatttcctttctaacctatctcttatccaaactatatacccgcccccctttttttcatgggaaactcgtaatgattataataattcatgaccgctcactggacacggcaaccctggttggacgggccaccaggggtgtacatacactccgaataactcgaaaaagaaacccgcgagggttttt

SEQ ID NO: 20690 - DNA, 208 bp, Mauremys reevesii
  source 1..208: mol_type = genomic DNA
ggtcctgtccctcatgtgctgaatttcctttctaacctatctcttatccaaactatatacccgcccccctttttttcatgggaaactcgtaatgattataataattcatgaccgctcactggacacggcaaccctggttggacgggccaccaggggtgtacatacactccgaataactcgaaaaagaaacccgcgagggtttttaaaa

SEQ ID NO: 20691 - DNA, 116 bp, Rafetus swinhoei
  source 1..116: mol_type = genomic DNA
tgattataataaaattcatgaccgcgatcacttgacaggacaaagggttggatgagccacccggggttaggaacaccccgaataactcagaacaggacccgcgtgggttttcaaaa

SEQ ID NO: 20692 - DNA, 150 bp, Schizopygopsis pylzovi
  source 1..150: mol_type = genomic DNA
accagaaagtcaaccatcaagaatgacccgctggaaagagcggcgaaaaaatccctaacaaactcaccattagcatctctttagatgccaacaggtaatagtggaagaacaactccacagctattgcgagtcaatataacaagatgtcaa

SEQ ID NO: 20693 - DNA, 151 bp, Schizopygopsis pylzovi
  source 1..151: mol_type = genomic DNA
gccagaaagtctaccatcaggaatgacccgctggaaagagcggcaaaaataatccctaacaaactcaccattagcatctctttagatgccaacaggtaatagtggaagaacaactccacggctattgcgggtcaataaaacaagatgtcaa

SEQ ID NO: 20694 - DNA, 169 bp, Melanotaenia boesemani
  source 1..169: mol_type = genomic DNA
ggttccctcaccctctggttggtggtcagccagtaaaaggggggacagtggggctcgtaatgattacaagcactgggagttacatggatgactcccggatgcgtatcatgcgtagcaccacgatgatatggacggaccgcttaatccggaaaagctacggctctaaatg

SEQ ID NO: 20695 - DNA, 150 bp, Gymnocypris eckloni
  source 1..150: mol_type = genomic DNA
gacgaaaagcctaccagcaagaatgacctgctcgaaagagtggcgaagagaaaccttaacatactcaccaatagcgtctcattagacgcccccgattacagtggaataacaactacacagctattgctaggcaataaaacaagaagttaa

SEQ ID NO: 20696 - DNA, 268 bp, Zoroaster sp. YZ-2022
  source 1..268: mol_type = genomic DNA
gatgctgttcttagggccaactccctgtcgatctctggctcttcttcaccgggggtgtcacgccacctgcgaaccccgtcgagccgggactgtccagtcccttaaattgcccgactgacggtgggacgtcgcccggcaactgagttcagggccggctaggcgttggaacttgcctcccccgcgctttacgcagggatggtggtatttacctaaataataattgttcgcctacacgaggcatatgtcgtgaaagtctacgtaccttaaa

SEQ ID NO: 20697 - DNA, 108 bp, Xenentodon cancila
  source 1..108: mol_type = genomic DNA
taggcgcgggggcagtgggctcgtaatgattataatatcatgcgtagcacacaaagatggccggtcacggagacgttcaatccggaaagcggtggtacccgcctaaac

SEQ ID NO: 20698 - DNA, 154 bp, Schizopygopsis malacanthus
  source 1..154: mol_type = genomic DNA
agaactcaggttggaatgtcacgcataatgacccgcacaaaatgcggcgataggaacttgcctcgacgagctaattacgcctttttaggcgtctcgagcgtcggtgggacaacatctccacttgggacaggacgtcttgacaacatgatgtaaa

SEQ ID NO: 20699 - DNA, 424 bp, Hoplias malabaricus
  source 1..424: mol_type = genomic DNA
gggagtttttcccccactggctaggatcaccctctgtgcagatgaggggggtggtctgaatatggcgcatctgcatcatcggacaggttctccccggcgggttgggacgggggtgtgggggcaggtagctcccaggtctggagaggagggtgcaccccctataatcttacaactggttgcagggaatctcgattaccgtccccggccattacactcaagcctcggttgcgtgaccgaggcgggccgggtgatgccattgcgcggggacactttctactgggaagtgcgccttgattcaggtcctgtatatgctggaggggcgccccaaaggtagcaggatctgaacagtccagaacggaccctggacgacggaagcggcccgtataatccgcgaatgtagaacacgcgtgtgttctcccgaacg

SEQ ID NO: 20700 - DNA, 279 bp, Schizopygopsis pylzovi
  source 1..279: mol_type = genomic DNA
tgtacgggccgacgggaaggggactgcggtcgtggggtctaaccaccagagacctatccgatctatgtctattggcagtagcgggatcgcttaaatgctatgatacgtatacccgtggaacgtaaagaactcaggttggaatgtcacgcataatgacccgcacaaaatgcggcgataggaacttgcctcgacgagctaattacgcctttttaggcgtctcgagcgtcggtgggacaacatctccacttgggacaggacgtcttgacaacatgatgtaaa

SEQ ID NO: 20701 - DNA, 149 bp, Xiphophorus hellerii
  source 1..149: mol_type = genomic DNA
gggttgtgcacatcccccatggctgcggtgccctggaattgtgtgggtcagtgggagctcgtgatgaataaatcatcttgtgcagcactcggtgacacgtgacggccacgttcaagccggaaagcgggttgcggacaagcctgcctcag

SEQ ID NO: 20702 - DNA, 150 bp, Gambusia affinis
  source 1..150: mol_type = genomic DNA
gggggcccacaccccccaggctgcggtgacctggaagtgtgggggacagtggggctcgtgatgattacaatcgtcttgtgcaacactgggtgacgcgtgacggccacgtttcaagccggaaagcggggttgcgtgacaagcccgtcgaag

SEQ ID NO: 20703 - DNA, 150 bp, Schizopygopsis pylzovi
  source 1..150: mol_type = genomic DNA
gacgaaaagcctaccagcaagaatgacccgctcgaaagagtggcgaagagaaaccttaacatactcaccaatagcgtctctttagacgcccccgattacagtggaataacaactacacagctattgctaggcaataaaacaagaagttaa

SEQ ID NO: 20704 - DNA, 467 bp, Eublepharis macularius
  source 1..467: mol_type = genomic DNA
ctggacttgtggtggtggagggttaacctttttctggggagggaagaccaaacacggctgtacagcgacttggttcttcccaaaccggtttgaagtttggagattgtcggcttactaattacagctctattttaaattttctaatttatagtatttaaatttttaagttctttaataaagtttttgaattcactaattgtagtttatttataatttctgtttgggcatgtctaaatttaaatacggcaatttaggtagcctctcttgctgcggacaagcccaggctaaggggaatctcgtaatgattacctttgagctgcatgcacttaacatcatggtgcttgtttgctctcatgacgtgctcaccgaagaatgacatggtctttaactgtaaatggacgagccatcgggatctgaccaatcccactaactcgtaagagagagcctaggctctagtcaaaatagcc

SEQ ID NO: 20705 - DNA, 1234 bp, Gila orcuttii
  source 1..1234: mol_type = genomic DNA
tcaagaagtggcaggaacatgaatgcaaaatggttggttagaggcatggtggttcgaaggagcaattgaggaaggaaggtactgggccagaagggtcaacttggaggcggttgaagattgatgcgggccaggtgaaggatcaattgagcggaaaggtacaaaggactgatggaacaactattggcagaatcatgggtagtggtgtgggtttggcgtcccagcaccactatcattgaatgatggagcggacaaggccgggtattacgattgccactactctttgaaccatcattcgagaaagccagccgaccaggcgcaatcgagagctgtgtgggggttactccaaacctctccagcgtaacctcggttccgtttcccattgttctgacccaccttgatgtggctgcacaggctgatgtatcgtacactcctccgcatggtggatagagagcaatgggtctggtcgggcccgaggggcgaggtggagctcatggaaaagctgataagtaagggagacgcccctccgaacatctgacggaccatggagcactcaccttagtccacgggaaattgaaggcggacaaggcgtttatgtttttggccagagcggacaaggaggtaccgagaagagcgagcttttcggtaccggcgcttgggataggggagggcaggccggggctgggcccaccctctctgcgtcatcggtgctgaagtgtggttcgagagagttaacccttatgtgataagatcaggccggtttagggcgtcttcacgttgcaggtgaaggtaagtgcggatcggggtcatctcttcagggttcaagtctctgctgttttctgttcttgtcatttcagatgcggaccaggatcggaaatgtgttgcggacaaggaccggagcaggtgcaattaggtgaggagctggccggagggcgttaatcggaagtgggacggtgggcaagatctcgtactgatataatccacatgccgccacgcggaatggaccctaagaggtttcacaggacgaatttcgcggcattccttggttcatgcgctgctatacggtgacgtaagtatccccggtccagactatttagttatagtctagcatctccggatgctgcatctccggatgcaatagtatggaggacgagccgccttaaaactcggaaagtcgcgctcccaggtatcgtaccaggtgacgatatctgtttatccggcggcgcggcgtaatcga

SEQ ID NO: 20706 - DNA, 288 bp, Mauremys mutica
  source 1..288: mol_type = genomic DNA
agatcccggagacatcattccgtgtatcttgccgaaattaaattaacttaaattaaattttagttattttagtttccatgtcttgaaagaaattttaattttaattttattgttgctatttataatctgccctttagaatagggttttaagatttatatgggagttaataaacagatgacttttatttttgtaaatcattaagtacatttatttttaattactggatatggctgcggactggccgcaaagtaaccaggaaagggcaggttgtcacgcctgtacataaa

SEQ ID NO: 20707 - DNA, 234 bp, Ahaetulla prasina
  source 1..234: mol_type = genomic DNA
acaatctgttttgtgtgttgcttgtatccgttgacataactgtcttctagcgattgtatcgccttagaaagcctggcgggcgggaaggggatagagagatgtattatgctttatatgtattgtatactgatgtatttttggtgtccgaatactgatgtatcttactgtaaatgtatcatgcactgctataacctgtactgttttgccttgcctttctaaaaataaacagttaaa

SEQ ID NO: 20708 - DNA, 439 bp, Ascidia mentula
  source 1..439: mol_type = genomic DNA
tgatcgcgcctgcaagacggcggtgagtgcggttttactccgccttagtgtagggaaaagggggtggcgaccccggtggtggaccttgttgtcgattgttcgggttttattggggtgagtggggtagtgagagttgccttttggcatggtagatcgcgtagggttcgagcgaaaaaggttggtttagtctgtggccgagttttaggctgataagggttctggcaacatggtcgtagttaatatggggggaggttaggataggggtgaggggggtggggggttaggttttgggaggggggaggttagttaaaatgtagatagcgagcggaggagaggttggaggccgaccgtaactggccgaacgatgggatcgatgactaaaaccttatcgcccggcacttgggtgcgtttcgacgccccatgtgtgcatgcgttaacc

SEQ ID NO: 20709 - DNA, 405 bp, Callorhinchus milii
  source 1..405: mol_type = genomic DNA
gaaaaatgagggagtgcatgggttggcacactccactctctgttgccaacggtgcctggtaatagagtgacgacagctgaaggcactgatgacattggcgtacaccagtttgggggtcctggtaatattgattcccattccctgttgccaaccgtgccaggtaacagggcgacgacagcttgaggcaccgaggacattggcgtacaccagtttgggggtcctggtaatattggccttcattctctgatatccttggtgccagatatcagagcgacgacaaaccggcgaccgcatgggaatctcgtgatgattaaaatcatcttgcgcattaaccactattgacgttggttatggacgggccattcaacccggaaaggatcggcttgtaaaaaagccgaatgaaaa

SEQ ID NO: 20710 - DNA, 264 bp, Phrynosoma blainvillii
  source 1..264: mol_type = genomic DNA
gtgttagtttgtacaccttgttagtttgtacactttgttgttgttgtttgtttgatgttatttaactatttattcattaaaaaccggacatgggatctcgtaatgattaccgccctgccctccaacctaaacacctgaggtggaggctgggatcatgcaactcaccctgacttgaccctgaccttaaaagatggatgggccatcgcgggggttggtctccccgcaacaactcaaaaacgaactggcgcgagtcagtttctaaaa

SEQ ID NO: 20711 - DNA, 261 bp, Aldabrachelys gigantea
  source 1..261: mol_type = genomic DNA
agatcccggagtttccattccgtgtatcttgccatagctataatttgctagattggtttttagctttttagtctttttgtgctattactacctgtcctggtagttgattttaagatttaataaatgcttaattaagggctattttatgtctatttttaaattattaatggctatggatttttttagttaccttatcggacatggatgcggactggccgcaaagtaaccaggaaagggcaggtagtcacgcctgtacatgaa

SEQ ID NO: 20712 - DNA, 273 bp, Gopherus flavomarginatus
  source 1..273: mol_type = genomic DNA
agatcccggagttgccattccgtgtatcttgccaaattttaaaattagtggtaattatttaattccatgattttaatgctatttgtgttattactatctgtccaaattttaatattattttaaatttgatatttagtaaataaatgcttattttatggttgattttagctccattcttaaattattaaatagataattatgttttactggatatagacgcggactggccgcagagtaaccaggaaagggcaggtagtcacgcctgtacatgaa

SEQ ID NO: 20713 - DNA, 397 bp, synthetic construct; identical to SEQ ID NO: 3003
  source 1..397: mol_type = other DNA

SEQ ID NO: 20714 - DNA, 249 bp, synthetic construct
  source 1..249: mol_type = other DNA
acattttcattatattactttgaatttgtttagttgtagagtagtagatgtaataagtagatgtattagtggttgtatatgtagtattgtagtattgtagattgtaatgtagtatgtaaaaaaatctggactgggatctcgtgatgattacctttaatcatgacgctcactggataggacttggtaggtggacgggccaccttcataaaacccggaaaaagttcacataccttgttatgtgttcgtaaa

SEQ ID NO: 20715 - DNA, 299 bp, synthetic construct; identical to SEQ ID NO: 1845
  source 1..299: mol_type = other DNA

SEQ ID NO: 20716 - DNA, 303 bp, synthetic construct; identical to SEQ ID NO: 1874
  source 1..303: mol_type = other DNA

SEQ ID NO: 20717 - DNA, 320 bp, synthetic construct; identical to SEQ ID NO: 3006
  source 1..320: mol_type = other DNA

SEQ ID NO: 20718 - DNA, 188 bp, synthetic construct; identical to SEQ ID NO: 3007
  source 1..188: mol_type = other DNA

SEQ ID NO: 20719 - DNA, 334 bp, synthetic construct; identical to SEQ ID NO: 1844
  source 1..334: mol_type = other DNA

SEQ ID NO: 20720 - DNA, 250 bp, synthetic construct; identical to SEQ ID NO: 1846
  source 1..250: mol_type = other DNA

SEQ ID NO: 20721 - DNA, 324 bp, synthetic construct; identical to SEQ ID NO: 1847
  source 1..324: mol_type = other DNA

SEQ ID NO: 20722 - DNA, 324 bp, synthetic construct; identical to SEQ ID NO: 2883
  source 1..324: mol_type = other DNA

SEQ ID NO: 20723 - DNA, 566 bp, synthetic construct; identical to SEQ ID NO: 1848
  source 1..566: mol_type = other DNA

SEQ ID NO: 20724 - DNA, 297 bp, synthetic construct
  source 1..297: mol_type = other DNA
gcagttctttttttttgtttttattattgttttatataaatacttctgtaatttttcctctgtacattcttttctcaataaagtttcgacgggagctggggacgcagggcagccacaagccagatataacaagccagaaggacgtggatagtaagtagggacgggacctattatttcataacgcgtcaattaccatctgatttggaccaatttaccggatttgtccgaggtggacgggccacctttacttaacccggaaaaggaacatatagtatttatatatatgtgttcgaaaaa

SEQ ID NO: 20725 - DNA, 196 bp, synthetic construct
  source 1..196: mol_type = other DNA
taaacttgtcggccccttcccggctgtcggtgacctggacagtggaattggttttgggtgggaggggttcatccttctatcgtgtcaatataccatcacccagactttgggtccaaaattctaatctggaccaggtggacgggccacctttacttaacccggaaaaggaacatataatctttatatgtttattaag

SEQ ID NO: 20726 - DNA, 389 bp, synthetic construct
  source 1..389: mol_type = other DNA
agtaggtagtcacattgcactttctgtaacttgcactggggtgtgggatgtgggtgtggggtgtgggttgtgggtttgtttttatatggtgttttattgggtgatatttttgtagaattggattctatttattgtatgcctattttgatactttttaataaacaagacggtagctatggttcgcaaagcacgccacaagccaatagccagttaggtagcttcatagtgggtaggtgacaggaacctttgactcagaacgcgtccattaacatctaatacggaccaatcttaccggacatgcaccgattaaccggatttgtccaaggtggacgggccacctttacttaacccggaaagggaacatatattatttatatgtgttcgaaaaa

SEQ ID NO: 20727 - DNA, 389 bp, synthetic construct
  source 1..389: mol_type = other DNA
agtaggaatttatattgtactttttgtaaatttcacaggggtgtgggatgtgggtgtggggtgtgggttgtaggtttgtttttatatattgttttattgggtgaaatttttgtagcattggattatttttattgtatgtcctttttgatattttttaataaactagacggtagctatggttcgtagggcacgccacaagccaatagccagttaggtagcttcatagtgggtaggtgacagaaacctttaattcaaaacgcgtcaattaccatctgattcggaccaatcttaccggacttgtaccaatttaccggatttgtccaaggtggacgggccacctttacttaacccggaaaaggaacatatattatttatatgtgttcgaaaaa

SEQ ID NO: 20728 - DNA, 347 bp, synthetic construct
  source 1..347: mol_type = other DNA
ttcaggttattcagttgcttatttttgtttttattattgttttgtttaagattttgatagtgttagtatttttatatttttgtacgattgcataatgttttttcttttgtacttccgtttctcaataaagttttgacgggagctggggacgtcagggcagccacaagccagatattacaagccagtaaggacgcggatagtaagtagggacgggcacttattatttcataacgcgtcaattaccacctgatttggaccaattcaccggatttgtccgaggtggacgggccacctttacttaacccggaaaaggaacatatattatttatatatatgtgttcgaaaaa

SEQ ID NO: 20729-20739 - skipped (11 entries)

SEQ ID NO: 20740 - protein, 982 aa, Parhyale hawaiensis
MDEYQRSLSRPLLTIMSINIEGLSLAKEELLAKMSEDISCDILCIQETHRDITMRRPKILGMQLAVERPHRQYGSAIFVRSGVAISATSLTEVNNIEILSVELDSCTVSSLYKPPGADFYFTPPTSCHNHEAHFVVGDFNSHSCVWGYDEDDRNGEAVLTWADNSRMSLLHDSKLPPSFNSGRWKRGYNPDLIFVWESISHQCTKRVLNPIPNTQHRPICCVAYAAVRPKSVPFRRRFNFNKANWTKFTETLEAAISDIEPSIENYDLFVEAVKRSSRLSIPRGCRTSYLPGLNEESLNQLQEYLRLFQENPYSDGTIAAGQKLSTALANAKKDRWIELLENLDMSKSSRKAWQLLRRLDSDPLVNPGHANVTPDQIAHQLIQNGKTNCSRIKMKINRVPELETHQLSSPLNLKELREAIKRCKTGKAPGLDDLMMEQIKHLGPKAENWLLKFYNQCLAHKQIPRAWRKTKIIAILKPGKDASNARNYRPISLLCHLYKVYERMLLNRLGPVIEPKLIAQQAGFRPGKNCTGQILHLTEHIEEGYEKGCITGTVFVDLTAAYDTVQHRKMLHKVYHITRDFDFTKTVQTLLENRSFYVEFQGQKSRWRRQKNGLPQGSVLAPTLFNIFTNDQPQPPLTKSFIYADDLGLTTQAKDFETVEKQLTNALKDLSSYYKENHLKPNPAKTQVCAFHLRNREANRKLKVTWEGQELEHCFHPKYLGVTLDRTLTYRKHCMNTKHKVAARNNILRKLTGSAWGADPQVIRTSALALSFSTAEYACPVWHKSAHAKQVDIALNETCRIITGCLKPTPVDKLYKLAGIAPPDVRREVAANGERKKVEHCESHPLHGYHPPPTRLKSRKGFMRTTTPLDVPPAAARVSLWAAKPGNSNWMAPQEGLPPGANQEWATWKSLNRLRSGVGRSKDNLARWHYLEESSTLCDCGAEQTTQHMYACPQCPASCTEEELFKATDNAVAVARFWSKTI

SEQ ID NO: 20741 - DNA, 5283 bp, synthetic construct
  source 1..5283: mol_type = other DNA
taatacgactcactataaggaaataagagagaaaagaagagtaagaagaaatataagagaattcgccaccatggcccctaagaaaaagcggaaggtgaatatcagcggctctagctgcggcagccccaacagcgccgacaccagcagcgacttcaaggacctgtggaccaagctgaaggaatgccacgaccgggaagtgcagggactccaggtgaaggtcaccaaactcaagcaagaaagaatcctggacgcccagagactggaagaattcttcaccaagaaccagcagctgagagagcagcagaaagtgctgcacgagacaatcaaggttctggaagatagactgcgggccggcctgtgcgacagatgcgccgtgaccgaggaacacatgcgcaaaaagcagcaggagttcgagaacattagacagcaaaatctgaaattgatcacagagctgatgaacgagagaaacacactgcaggaggagaacaagaagctgagcgagcagctgcaacagaagatcgagaatgatcagcaacaccaggccgctgagctggaatgtgaagaggacgtgatccccgacagcccaatcacagctttcagcttttctggcgtgaacagactgaggcggaaggaaaacccccacgtgcggtacatcgagcagacccataccaagctggaacacagcgtgtgtgccaacgagatgagaaaggtgtccaagtcctccacccatccccagcacaaccctaacgaaaatgagatcctggtggctgatacctacgaccagtctcagagccctatggccaaggcccacggcaccagctcttatacccctgataagagctccttcaacctggccaccgtggtggccgagacactgggcctgggcgtgcaggaggaaagcgagacacagggcccaatgagccctctgggagatgagctgtaccactgcctggaaggcaaccacaagaaacagccttttgagtccggctccgagactcctggaacaagcgagagcgctacacctgagggcagccctaagagaaaggtgtccagcgccgagggcgctgccaaggaagagcctaaacggagaagcgccagactgagcgccaagccccccgccaaggtggaagccaagcctaagaaggccgccgctaaggacaagagcagcgataagaaagtccagaccaagggcaagcggggcgccaaaggcaaacaggccgaggtggccaaccaggagacaaaggaagatctgcctgctgagaacggcgaaaccaagaccgaggaatctccagcttctgacgaggccggagagaaggaggccaaaagcgacagcggctctgagacacctggaacaagcgagagcgccaccccggaatcctatgaacaacttgcaccacaaccgtgtgtgggagaaactttacattctagcctcccacgagacagtgaactgtttgtgcctgaagaggggagcagcgagaaggagagcgaggacgcgccaaaaacatctcctccgacgcctgggaaacatggtttggaacagactggggaggaaaaagtgatggtgactgttcctgacaaaaatccaccttgtccttgctgtggtacccgggtaaactctgtgttgaatctgattgaacatctgaaagtgtcacacgggaaaaggggggtttgttttcggtgtgcaaaatgtggaaaggaaaatagtaactatcacagtgttgtttgtcattttaagaaatgcaggggtccagagacggagaaagccccagctggggagtggatttgtgaggtatgcaacagagattttacaaccaaaattggcctgggacaacacaagagattggcacacccagcagtgagaaatcaggaaaggatcgttgcttcccaaccgaaagaaacatcaaatagaggtgctcacaaaaggtgctggacaaaggaggaggaagaattactaataagactggaggctcagttcgagggaaacaaaaatattaataagcttattgcagaacacataaccaccaaaacagctaagcagatcagtgacaaaaggcgattgctgtccagaaagccagcagaggagccacgtgaggagcctggaacgtgtcatcacaccaggagagcagctgcgagcctgagaacggagcctgagatgagtcatcacgcccaggcagaggacagagataatggacctgggagacgccctctgccaggcagggcagctgccggagggagaacaatggacgagataagacgccaccctgataagggcaacggacagcagagacccaccaagcaaaaatcagaagaacagctgcaggcttactataaaaagacactagaggaacgactttcagctggggcacttaacaccttcccccgagcattcaagcaggtaatggaaggccgggatataaagctagtaatcaatcagacagcgcaggactgcttcggatgcctggaatccataagccaaataagaacggcaacccgagataaaaaggacacggtgacccgggagaaacacccaaagaaaccttttcagaagtggatgaagaagagagcaatcaaaaaaggtaattatcttcggttccagcgtttattttatcttgatagagggaaactggctaaaatcattttagatgatattgaatgcttgtcttgtgacataccactcagtgaaatttattcggtttttaaaacaagatgggaaacaactggtagctttaaaagccttggggactttaaaacttacgggaaggctgacaacactgccttcagagaattaattacggctaaagaaattgagaaaaatgtgcaggaaatgagcaaaggctcggctcccggtccagacgggattactcttggggacgtcgtaaagatggatcccgagttttcccggaccatggagattttcaatttatggttaacaactggtaaaatcccggacatggtgagggggtgcagaaccgttttgattccaaaatcatcaaagccggatcgtttgaaagacattaataactggagacctatcacgatcggttccatcttgctgagactgttctccaggattgtaacagctaggctgagcaaagcgtgccccctgaacccaaggcaaagaggctttatcagagcggcgggatgctctgaaaacttaaaactcctgcaaactataatttggtcggccaaaagagaacacagaccactgggtgttgtattcgtggacatcgccaaggcttttgacaccgtaagccaccagcacatcattcatgctttgcagcaaagagaggtggatccccacatcgtcggtctggtgagcaatatgtacgagaacatcagtacgtatatcaccacaaagaggaacacacacacagacaaaatccagatccgggttggagtaaagcagggtgacccgatgtcgccccttttatttaacctggcaatggaccctctattatgcaagctggaagagagtggcaaaggataccaccgaggacagagcagcatcacagcgatggcatttgcagacgatctggttttgctgagcgactcctgggaaaatatgaatacaaatattagcatactggagaccttctgcaatctgaccggactcaaaacacaggggcaaaagtgccacggcttttacatcaagccgacaaaggactcttacaccatcaatgactgcgctgcctggactatcaacggcacacccctgaacatgatcgaccccggcgaatctgagaaatacctcggcctgcagtttgacccgtggattggaatagcaaggtccggtctctccacaaaactagatttttggcttcagcggatcgatcaagcaccacttaaacctctgcagaaaactgatattctcaaaacatacaccatccctcggctgatctacatagctgaccactcagaagtgaaaagcgcactactcgaaacccttgaccagaagatccggacagcggtcaaggaatggcttcacctacctccgtgcacctgcgatgccatcctgtactcgagcacgagagacggcggtttgggcatcaccaaattggcaggactgatccccagcgtgcaggcccgtagactgcatcggatcgcacagtcatctgacgatacgatgaaatgcttcatggaaaaagagaaaatggaacagctgcataagaaattgtggattcaagctggaggggacagagagaacataccctcgatttgggaagcaccaccgtcgagtgaaccaccaaacaacgtgagcacaaattcggaatgggaagcaccgacccagaaagataaatttccaaagccttgcaattggaggaaaaacgaattcaaaaaatggaccaaattggcatcccaaggccgcggaattgtaaattttgaaagagacaaaattagtaaccattggatccaatactacagacgcatacctcacaggaaactcctcactgcactacaactcagggccaacgtttaccccacgagagaatttctagccaggggtagacaagaccaatacatcaaggcgtgtaggcactgcgatgcggacaacgaatcctgcgcccacatcatcggcaactgcccagtgacacaggacgcccgaatcaagaggcacaattacatctgcgaactgcttctcgaggaggcgaagaagaaggactgggtagtgttcaaggaaccgcacataagggattccaacaaggaactgtacaaacctgacctgatatttgtgaaggatgggcgtgcacttgtcgtggatgtgacagtacggtatgaagcagccaaatcatcgctggaggaagccgctgcagagaaagtgagaaagtacaaacacctggaaacggaagtaagacatctcacgaatgcaaaggacgttacttttgtgggctttcccctaggagcgcgggggaaatggcaccaagataactttaaacttttgactgagcttggcctctccaaatcgaggcaagtgaaaatggcagagactttttccacagtagcgctcttttcatctgtggacattgtacatatgtttgccagtagggccagaaaatctatggttatgtgataataggctgccttctgcggggcttgccttctggccatgcccttcttctctcccttgcacctgtacctcttggtctttgaataaagcctgagtaggaaggaccggtaaaaaaaaaaaaaaaaaaaaaaaaaaaaaaacgttgactaaaaaaaaaaaaaaaaaaaaaaaaaaaaaaaaaaaaaaaaaaaaaaaaaaaaaaaaaaaaaaaaaaaaaa

SEQ ID NO: 20742 - DNA, 20 bp, synthetic construct
  source 1..20: mol_type = other DNA
taatacgactcactataagg

SEQ ID NO: 20743 - DNA, 51 bp, synthetic construct; identical to SEQ ID NO: 1891
  source 1..51: mol_type = other DNA

SEQ ID NO: 20744 - DNA, 4995 bp, synthetic construct
  source 1..4995: mol_type = other DNA
atggcccctaagaaaaagcggaaggtgaatatcagcggctctagctgcggcagccccaacagcgccgacaccagcagcgacttcaaggacctgtggaccaagctgaaggaatgccacgaccgggaagtgcagggactccaggtgaaggtcaccaaactcaagcaagaaagaatcctggacgcccagagactggaagaattcttcaccaagaaccagcagctgagagagcagcagaaagtgctgcacgagacaatcaaggttctggaagatagactgcgggccggcctgtgcgacagatgcgccgtgaccgaggaacacatgcgcaaaaagcagcaggagttcgagaacattagacagcaaaatctgaaattgatcacagagctgatgaacgagagaaacacactgcaggaggagaacaagaagctgagcgagcagctgcaacagaagatcgagaatgatcagcaacaccaggccgctgagctggaatgtgaagaggacgtgatccccgacagcccaatcacagctttcagcttttctggcgtgaacagactgaggcggaaggaaaacccccacgtgcggtacatcgagcagacccataccaagctggaacacagcgtgtgtgccaacgagatgagaaaggtgtccaagtcctccacccatccccagcacaaccctaacgaaaatgagatcctggtggctgatacctacgaccagtctcagagccctatggccaaggcccacggcaccagctcttatacccctgataagagctccttcaacctggccaccgtggtggccgagacactgggcctgggcgtgcaggaggaaagcgagacacagggcccaatgagccctctgggagatgagctgtaccactgcctggaaggcaaccacaagaaacagccttttgagtccggctccgagactcctggaacaagcgagagcgctacacctgagggcagccctaagagaaaggtgtccagcgccgagggcgctgccaaggaagagcctaaacggagaagcgccagactgagcgccaagccccccgccaaggtggaagccaagcctaagaaggccgccgctaaggacaagagcagcgataagaaagtccagaccaagggcaagcggggcgccaaaggcaaacaggccgaggtggccaaccaggagacaaaggaagatctgcctgctgagaacggcgaaaccaagaccgaggaatctccagcttctgacgaggccggagagaaggaggccaaaagcgacagcggctctgagacacctggaacaagcgagagcgccaccccggaatcctatgaacaacttgcaccacaaccgtgtgtgggagaaactttacattctagcctcccacgagacagtgaactgtttgtgcctgaagaggggagcagcgagaaggagagcgaggacgcgccaaaaacatctcctccgacgcctgggaaacatggtttggaacagactggggaggaaaaagtgatggtgactgttcctgacaaaaatccaccttgtccttgctgtggtacccgggtaaactctgtgttgaatctgattgaacatctgaaagtgtcacacgggaaaaggggggtttgttttcggtgtgcaaaatgtggaaaggaaaatagtaactatcacagtgttgtttgtcattttaagaaatgcaggggtccagagacggagaaagccccagctggggagtggatttgtgaggtatgcaacagagattttacaaccaaaattggcctgggacaacacaagagattggcacacccagcagtgagaaatcaggaaaggatcgttgcttcccaaccgaaagaaacatcaaatagaggtgctcacaaaaggtgctggacaaaggaggaggaagaattactaataagactggaggctcagttcgagggaaacaaaaatattaataagcttattgcagaacacataaccaccaaaacagctaagcagatcagtgacaaaaggcgattgctgtccagaaagccagcagaggagccacgtgaggagcctggaacgtgtcatcacaccaggagagcagctgcgagcctgagaacggagcctgagatgagtcatcacgcccaggcagaggacagagataatggacctgggagacgccctctgccaggcagggcagctgccggagggagaacaatggacgagataagacgccaccctgataagggcaacggacagcagagacccaccaagcaaaaatcagaagaacagctgcaggcttactataaaaagacactagaggaacgactttcagctggggcacttaacaccttcccccgagcattcaagcaggtaatggaaggccgggatataaagctagtaatcaatcagacagcgcaggactgcttcggatgcctggaatccataagccaaataagaacggcaacccgagataaaaaggacacggtgacccgggagaaacacccaaagaaaccttttcagaagtggatgaagaagagagcaatcaaaaaaggtaattatcttcggttccagcgtttattttatcttgatagagggaaactggctaaaatcattttagatgatattgaatgcttgtcttgtgacataccactcagtgaaatttattcggtttttaaaacaagatgggaaacaactggtagctttaaaagccttggggactttaaaacttacgggaaggctgacaacactgccttcagagaattaattacggctaaagaaattgagaaaaatgtgcaggaaatgagcaaaggctcggctcccggtccagacgggattactcttggggacgtcgtaaagatggatcccgagttttcccggaccatggagattttcaatttatggttaacaactggtaaaatcccggacatggtgagggggtgcagaaccgttttgattccaaaatcatcaaagccggatcgtttgaaagacattaataactggagacctatcacgatcggttccatcttgctgagactgttctccaggattgtaacagctaggctgagcaaagcgtgccccctgaacccaaggcaaagaggctttatcagagcggcgggatgctctgaaaacttaaaactcctgcaaactataatttggtcggccaaaagagaacacagaccactgggtgttgtattcgtggacatcgccaaggcttttgacaccgtaagccaccagcacatcattcatgctttgcagcaaagagaggtggatccccacatcgtcggtctggtgagcaatatgtacgagaacatcagtacgtatatcaccacaaagaggaacacacacacagacaaaatccagatccgggttggagtaaagcagggtgacccgatgtcgccccttttatttaacctggcaatggaccctctattatgcaagctggaagagagtggcaaaggataccaccgaggacagagcagcatcacagcgatggcatttgcagacgatctggttttgctgagcgactcctgggaaaatatgaatacaaatattagcatactggagaccttctgcaatctgaccggactcaaaacacaggggcaaaagtgccacggcttttacatcaagccgacaaaggactcttacaccatcaatgactgcgctgcctggactatcaacggcacacccctgaacatgatcgaccccggcgaatctgagaaatacctcggcctgcagtttgacccgtggattggaatagcaaggtccggtctctccacaaaactagatttttggcttcagcggatcgatcaagcaccacttaaacctctgcagaaaactgatattctcaaaacatacaccatccctcggctgatctacatagctgaccactcagaagtgaaaagcgcactactcgaaacccttgaccagaagatccggacagcggtcaaggaatggcttcacctacctccgtgcacctgcgatgccatcctgtactcgagcacgagagacggcggtttgggcatcaccaaattggcaggactgatccccagcgtgcaggcccgtagactgcatcggatcgcacagtcatctgacgatacgatgaaatgcttcatggaaaaagagaaaatggaacagctgcataagaaattgtggattcaagctggaggggacagagagaacataccctcgatttgggaagcaccaccgtcgagtgaaccaccaaacaacgtgagcacaaattcggaatgggaagcaccgacccagaaagataaatttccaaagccttgcaattggaggaaaaacgaattcaaaaaatggaccaaattggcatcccaaggccgcggaattgtaaattttgaaagagacaaaattagtaaccattggatccaatactacagacgcatacctcacaggaaactcctcactgcactacaactcagggccaacgtttaccccacgagagaatttctagccaggggtagacaagaccaatacatcaaggcgtgtaggcactgcgatgcggacaacgaatcctgcgcccacatcatcggcaactgcccagtgacacaggacgcccgaatcaagaggcacaattacatctgcgaactgcttctcgaggaggcgaagaagaaggactgggtagtgttcaaggaaccgcacataagggattccaacaaggaactgtacaaacctgacctgatatttgtgaaggatgggcgtgcacttgtcgtggatgtgacagtacggtatgaagcagccaaatcatcgctggaggaagccgctgcagagaaagtgagaaagtacaaacacctggaaacggaagtaagacatctcacgaatgcaaaggacgttacttttgtgggctttcccctaggagcgcgggggaaatggcaccaagataactttaaacttttgactgagcttggcctctccaaatcgaggcaagtgaaaatggcagagactttttccacagtagcgctcttttcatctgtggacattgtacatatgtttgccagtagggccagaaaatctatggttatg

SEQ ID NO: 20745 - DNA, 93 bp, synthetic construct; identical to SEQ ID NO: 3025
  source 1..93: mol_type = other DNA

SEQ ID NO: 20746 - DNA, 20 bp, synthetic construct
  source 1..20: mol_type = other DNA
agtaactatgactctcttaa

SEQ ID NO: 20747 - DNA, 20 bp, synthetic construct
  source 1..20: mol_type = other DNA
tagccaaatgcctcgtcatc

SEQ ID NO: 20748 - protein, 239 aa, synthetic construct
MVSKGEELFTGVVPILVELDGDVNGHKFSVSGEGEGDATYGKLTLKFICTTGKLPVPWPTLVTTLTYGVQCFSRYPDHMKQHDFFKSAMPEGYVQERTIFFKDDGNYKTRAEVKFEGDTLVNRIELKGIDFKEDGNILGHKLEYNYNSHNVYIMADKQKNGIKVNFKIRHNIEDGSVQLADHYQQNTPIGDGPVLLPDNHYLSTQSALSKDPNEKRDHMVLLEFVTAAGITLGMDELYK

SEQ ID NO: 20749 - DNA, 542 bp, synthetic construct
  source 1..542: mol_type = other DNA
gattagtccaatttgttaaagacaggatatcagtggtccaggctctagttttgactcaacaatatcaccagctgaagcctatagagtacgagccatagatagaataaaagattttatttagtctccagaaaaaggggggaatgaaagaccccacctgtaggtttggcaagctaggatcaaggttaggaacagagagacagcagaatatgggccaaacaggatatctgtggtaagcagttcctgccccggctcagggccaagaacagttggaacagcagaatatgggccaaacaggatatctgtggtaagcagttcctgccccggctcagggccaagaacagatggtccccagatgcggtcccgccctcagcagtttctagagaaccatcagatgtttccagggtgccccaaggacctgaaatgaccctgtgccttatttgaactaaccaatcagttcgcttctcgcttctgttcgcgcgcttctgctccccgagctcaataaaagagcccacaaccctcactcggcgcgatctagttctcga

SEQ ID NO: 20750 - DNA, 635 bp, synthetic construct
  source 1..635: mol_type = other DNA
cgggtttattacagggacagcagagatccagtttgggaattagcttgatcgattagtccaatttgttaaagacaggatatcagtggtccaggctctagttttgactcaacaatatcaccagctgaagcctatagagtacgagccatagatagaataaaagattttatttagtctccagaaaaaggggggaatgaaagaccccacctgtaggtttggcaagctaggatcaaggttaggaacagagagacagcagaatatgggccaaacaggatatctgtggtaagcagttcctgccccggctcagggccaagaacagttggaacagcagaatatgggccaaacaggatatctgtggtaagcagttcctgccccggctcagggccaagaacagatggtccccagatgcggtcccgccctcagcagtttctagagaaccatcagatgtttccagggtgccccaaggacctgaaatgaccctgtgccttatttgaactaaccaatcagttcgcttctcgcttctgttcgcgcgcttctgctccccgagctcaataaaagagcccacaacccctcactcggcgcgatctagatctcgaatcgaattcgttaacctcgagggatctcctaggaagctttcc

SEQ ID NO: 20751 - DNA, 1179 bp, synthetic construct
  source 1..1179: mol_type = other DNA
ggctccggtgcccgtcagtgggcagagcgcacatcgcccacagtccccgagaagttggggggaggggtcggcaattgaaccggtgcctagagaaggtggcgcggggtaaactgggaaagtgatgtcgtgtactggctccgcctttttcccgagggtgggggagaaccgtatataagtgcagtagtcgccgtgaacgttctttttcgcaacgggtttgccgccagaacacaggtaagtgccgtgtgtggttcccgcgggcctggcctctttacgggttatggcccttgcgtgccttgaattacttccacctggctgcagtacgtgattcttgatcccgagcttcgggttggaagtgggtgggagagttcgaggccttgcgcttaaggagccccttcgcctcgtgcttgagttgaggcctggcctgggcgctggggccgccgcgtgcgaatctggtggcaccttcgcgcctgtctcgctgctttcgataagtctctagccatttaaaatttttgatgacctgctgcgacgctttttttctggcaagatagtcttgtaaatgcgggccaagatctgcacactggtatttcggtttttggggccgcgggcggcgacggggcccgtgcgtcccagcgcacatgttcggcgaggcggggcctgcgagcgcggccaccgagaatcggacgggggtagtctcaagctggccggcctgctctggtgcctggcctcgcgccgccgtgtatcgccccgccctgggcggcaaggctggcccggtcggcaccagttgcgtgagcggaaagatggccgcttcccggccctgctgcagggagctcaaaatggaggacgcggcgctcgggagagcgggcgggtgagtcacccacacaaaggaaaagggcctttccgtcctcagccgtcgcttcatgtgactccacggagtaccgggcgccgtccaggcacctcgattagttctcgagcttttggagtacgtcgtctttaggttggggggaggggttttatgcgatggagtttccccacactgagtgggtggagactgaagttaggccagcttggcacttgatgtaattctccttggaatttgccctttttgagtttggatcttggttcattctcaagcctcagacagtggttcaaagtttttttcttccatttcaggtgtcgtga

SEQ ID NO: 20752 - DNA, 109 bp, synthetic construct
  source 1..109: mol_type = other DNA
gggggacacggaaagagcctccccgaagattgagtgaattcagtcgggcgtcccctgggcaacgtttcttgtaagcggccgatctttccaccccaaaagcattggatga

SEQ ID NO: 20753 - DNA, 2949 bp, synthetic construct
  source 1..2949: mol_type = other DNA
atggatgaataccaaaggtctttatcaagaccattgctaacgattatgtctattaatatagaaggtttgtcacttgctaaggaagaactattagccaaaatgtctgaggacatctcgtgtgacatcctatgtatacaggaaacacacagagacatcacaatgaggagaccaaaaattcttggaatgcaactggcagtggaacgacctcacagacaatatggcagtgccatttttgtacgatctggtgtagcaatctctgcaacttccctcacagaagtgaacaacattgaaatcttatctgtggaacttgatagttgcaccgtatcatcactctataaaccacctggggctgatttctattttacacccccaaccagttgccacaatcatgaagcccattttgttgtgggagatttcaatagccacagctgtgtctggggctatgacgaagatgatagaaatggcgaagcagttctaacgtgggccgacaatagtagaatgagcctccttcatgacagtaaattaccaccatcatttaatagcggccgatggaagcgtggttataaccctgatctgatttttgtatgggaaagcataagccaccaatgcaccaaaagggtattaaacccaatacctaacacacaacacagaccaatatgctgcgtagcatatgcagctgtaagaccgaaaagtgtcccattccgcagaagatttaacttcaataaagctaactggacaaagtttacagagaccttggaagctgctatttctgatatagaaccttctatagaaaattatgacctgttcgtagaagctgtgaaaagatcctcaaggctctcaatccctagaggctgtcgcacaagctacctaccaggcctaaacgaagaatcactaaatcagctacaagaatatctcagattatttcaagagaacccatacagtgatgggactatagcagcaggccaaaaactatctacagccttagctaatgctaagaaagaccgttggatagagctgcttgagaacctggacatgtccaagagtagccgaaaagcctggcaattgctgagacgcctggatagtgaccctctggtcaaccctggacacgcgaacgtgacaccagatcagatagctcaccagctaattcagaatgggaaaaccaactgcagcagaataaagatgaaaatcaacagggtgccagaacttgaaacccaccagttgtcctctcctctaaacctgaaagaactcagagaagccatcaagcgatgtaagactggtaaagcacctggcctagatgacctgatgatggagcaaatcaaacacttggggcccaaagctgaaaactggcttttgaaattctacaatcaatgcctggcacacaaacagattcccagagcatggaggaaaactaagataattgccatcttaaaacctggtaaagatgcctccaatgccaggaactatcgaccaatctccctcttatgtcatctatataaagtctatgagaggatgctattaaatcgactaggacctgttatcgaacccaagcttattgcacaacaagcaggtttcagaccagggaaaaactgtacaggtcaaattcttcatctgactgaacatatcgaggaaggctatgagaaaggctgcattacgggaacagtctttgtggaccttacggcagcctatgacacggtgcaacatagaaaaatgctgcataaagtctaccatatcacccgggactttgactttacaaaaactgtccagaccctcttagaaaaccgcagcttctatgtggagtttcagggccagaaaagcagatggaggaggcaaaagaatggtttaccccaaggcagcgttcttgcaccaaccttatttaacatcttcacgaacgatcagccacaaccaccactcacaaagagctttatatatgctgatgaccttggccttacaacacaagcaaaagattttgaaacagttgaaaagcaactcaccaatgccttgaaagatctctccagctactacaaagagaaccacctgaagcctaaccctgccaagacacaagtgtgtgctttccacctacgtaaccgcgaagccaacaggaaactgaaagttacttgggaaggccaagagctcgaacactgtttccatcctaaataccttggtgtcaccttagaccgaacactaacatataggaaacactgcatgaacaccaagcacaaagtagctgcacgcaataacatcctgcggaaactgactggcagcgcatggggagcagacccacaagtaataagaacatcagccctggccttgtctttctcaactgcagagtatgcctgtcctgtttggcacaagtctgcccatgcaaagcaggtggacatagcactgaatgaaacatgcagaatcatcacgggatgccttaaacctacacctgttgataaactctacaagttagctggcattgcccctcctgacgtgcgacgggaagttgctgctaacggtgagagaaaaaaggtcgaacattgtgaaagccacccactgcatggctatcaccctcctcccaccagactcaaatcaaggaagggcttcatgagaaccaccactcctcttgatgttcctccagcagcagcaagggtgtccctctgggcagctaaacctggcaattctaactggatggccccccaagagggacttcctccaggggcaaaccaagaatgggcaacttggaagtccctgaacagactcagaagtggagtgggcagatcaaaagacaacttggcaaggtggcactacctggaggaatcctccaccttgtgtgactgtggagctgaacaaacaactcagcatatgtatgcttgcccacaatgccctgcctcatgtacggaggaggagttgtttaaagctacagacaatgcggttgctgttgcccgcttttggtccaaaactatttag

SEQ ID NO: 20754 - DNA, 488 bp, Parhyale hawaiensis
  source 1..488: mol_type = genomic DNA
ccgaccgccagcgggataactggcaaaccctgtctcgaccaccggcccgtgaatccatcggggcgtatgagtctgacacaggggggtgtttaaggtgaccctgttgcgaggaaatgcgcagcaaaagccggatgagccttagaacatcgaaggccaacgacaacctgccgaaagactggcgactaatccagtcaacctcctgtaggtcaccggctggtcatgctgaatctcagcttaaccaggcgtacgaacttacagttggagggtcgagcacccctgatggctgaaaaggaccatcaaagtcgaaggtagccaacgagaagaccaacggctgattcaggcggaagagtcaactcgttgaatgcgttcgacagcttggggtagatggaactcctaagccctgaaaggcagtccatcttcgcagacgctaaggtgccccgccgcctgagggttatcaggccccgccgcctgagggttaccaggcaacc

SEQ ID NO: 20755 - DNA, 106 bp, Parhyale hawaiensis
  source 1..106: mol_type = genomic DNA
tgagccttaggtcgcgggatgtgacccggcgccagagtgtagagctgaacatcgctcaaccgatccaatttgggtcgtgaaatcccctcgataataataataataa

SEQ ID NO: 20756 - DNA, 523 bp, synthetic construct
  source 1..523: mol_type = other DNA
agtaactatgactctcttaatgccggattggcgggaacagccgatcctagtaaggctggatgaattcatgcgggctgaagcagcggttctcccataaaataggggctttggggaaggtgggggacgtcgggggggcccctggagggacccctgtaccgataggggatccttgttttttcccctctacctggggcttttgtggggaggcgagggcacgtggtgagtgggggatggctgactggggaaagttaccaaggtatccccaaaacctgttttggtaggggtagggatacatactgggcacaactgtaattctctagcccaggaccgagaagttgggactcaccaacccaactttctcttgaaatttcggtgaaacaaatttaaggtataggtcatttgacttaatacccaaaacctggcccctgggtttttagagggcaaagtttggtagtttggcagggagggccgctactactcctgcttcaccctcccaccttgctaagactaatattttccggac

SEQ ID NO: 20757 - DNA, 431 bp, synthetic construct
  source 1..431: mol_type = other DNA
tgttgtttatttttgtacatattgttgttttatttatttccactgtacattcgattcaataaacttcgacgggtgctggggcgcggggcagccacaggccagatatcacaagccagaaggacgtggacagtaagtagggacgggacttattatttcataacgcgtcaattaccatctgatttggaccaatttaccgaatttgtccaaggtggacgggccacctttacttaacccggaaaaggagcatatatatttatatatatgtgttcgaaaaatagccaaatgcctcgtcatcccggtagcgctagcaccggtaaaaaaaaaaaaaaaaaaaaaaaaaaaaaaaacgttgactaaaaaaaaaaaaaaaaaaaaaaaaaaaaaaaaaaaaaaaaaaaaaaaaaaaaaaaaaaaaaaaaaaaaaaaaaaaa

SEQ ID NO: 20758 - protein, 295 aa, synthetic construct; identical to SEQ ID NO: 61

SEQ ID NO: 20759 - protein, 99 aa, synthetic construct
PKRKVSSAEGAAKEEPKRRSARLSAKPPAKVEAKPKKAAAKDKSSDKKVQTKGKRGAKGKQAEVANQETKEDLPAENGETKTEESPASDEAGEKEAKSD

SEQ ID NO: 20760 - protein, 8 aa, synthetic construct
SESATPES

SEQ ID NO: 20761-30000 - skipped (9240 entries)

SEQ ID NO: 30001 - protein, 1266 aa, Acridotheres tristis; identical to SEQ ID NO: 437

SEQ ID NO: 30002 - protein, 1342 aa, Acrocephalus scirpaceus; identical to SEQ ID NO: 438

SEQ ID NO: 30003 - protein, 1438 aa, Agelaius tricolor; identical to SEQ ID NO: 439

SEQ ID NO: 30004 - protein, 1337 aa, Ammodramus caudacutus; identical to SEQ ID NO: 440

SEQ ID NO: 30005 - protein, 1337 aa, Ammospiza nelsoni; identical to SEQ ID NO: 441

SEQ ID NO: 30006 - protein, 1024 aa, Buteo platypterus; identical to SEQ ID NO: 443

SEQ ID NO: 30007 - protein, 1417 aa, Chamaetylas choloensis; identical to SEQ ID NO: 444

SEQ ID NO: 30008 - protein, 1230 aa, Chamaetylas fuelleborni; identical to SEQ ID NO: 445

SEQ ID NO: 30009 - protein, 1417 aa, Cichladusa arquata; identical to SEQ ID NO: 446

SEQ ID NO: 30010 - protein, 1257 aa, Ciconia episcopus; identical to SEQ ID NO: 447

SEQ ID NO: 30011 - protein, 1245 aa, Colaptes auratus; identical to SEQ ID NO: 449

SEQ ID NO: 30012 - protein, 1246 aa, Cossypha archeri; identical to SEQ ID NO: 450

SEQ ID NO: 30013 - protein, 1230 aa, Cossypha dichroa; identical to SEQ ID NO: 451

SEQ ID NO: 30014 - protein, 1213 aa, Falco fasciinucha; identical to SEQ ID NO: 452

SEQ ID NO: 30015 - protein, 1238 aa, Gallinago paraguaiae; identical to SEQ ID NO: 453

SEQ ID NO: 30016 - protein, 1392 aa, Garrulus glandarius; identical to SEQ ID NO: 454

SEQ ID NO: 30017 - protein, 1261 aa, Geranoaetus albicaudatus; identical to SEQ ID NO: 455

SEQ ID NO: 30018 - protein, 1260 aa, Harpyopsis novaeguineae; identical to SEQ ID NO: 456

SEQ ID NO: 30019 - protein, 1239 aa, Limnodromus scolopaceus; identical to SEQ ID NO: 457

SEQ ID NO: 30020 - protein, 1259 aa, Melierax canorus; identical to SEQ ID NO: 458

SEQ ID NO: 30021 - protein, 1243 aa, Myiozetetes cayanensis; identical to SEQ ID NO: 459

SEQ ID NO: 30022 - protein, 1253 aa, Otis tarda; identical to SEQ ID NO: 460

SEQ ID NO: 30023 - protein, 1231 aa, Prinia subflava; identical to SEQ ID NO: 461

SEQ ID NO: 30024 - protein, 1326 aa, Serinus canaria; identical to SEQ ID NO: 463

SEQ ID NO: 30025 - protein, 1230 aa, Aphelocoma californica; identical to SEQ ID NO: 466

SEQ ID NO: 30026 - protein, 1364 aa, Oenanthe melanoleuca; identical to SEQ ID NO: 470

SEQ ID NO: 30027 - protein, 1434 aa, Phylloscopus trochilus; identical to SEQ ID NO: 471

SEQ ID NO: 30028 - protein, 1181 aa, Geothlypis trichas; identical to SEQ ID NO: 473

SEQ ID NO: 30029 - protein, 1245 aa, Xenus cinereus; identical to SEQ ID NO: 474

SEQ ID NO: 30030 - protein, 1392 aa, Aphelocoma californica; identical to SEQ ID NO: 475

SEQ ID NO: 30031 - protein, 1230 aa, Cichladusa arquata; identical to SEQ ID NO: 476

SEQ ID NO: 30032 - protein, 1243 aa, Scolopax minor; identical to SEQ ID NO: 480

SEQ ID NO: 30033 - protein, 1255 aa, Tyto alba; identical to SEQ ID NO: 414

SEQ ID NO: 30034 - protein, 1088 aa, Acrocera orbiculus; identical to SEQ ID NO: 422

SEQ ID NO: 30035 - protein, 1031 aa, Drosophila sulfurigaster; identical to SEQ ID NO: 430

SEQ ID NO: 30036 - protein, 1069 aa, Rhopalosiphum padi; identical to SEQ ID NO: 431

SEQ ID NO: 30037 - protein, 1114 aa, Nemotelus nigrinus; identical to SEQ ID NO: 433

SEQ ID NO: 30038 - protein, 1020 aa, Chlorops oryzae; identical to SEQ ID NO: 435

SEQ ID NO: 30039 - protein, 1146 aa, Andrena bucephala; identical to SEQ ID NO: 436

SEQ ID NO: 30040 - protein, 1120 aa, Ascidia mentula
MMNPCSKRKTPDRSGNSVKELTGILTVRPGRLERSADVHLTCQPGVVMRNSPSTSTVNLTYEGKERIRCQLCSEVLPTDSKAQGHLQKHRARSSGYSCGRCKKTYERMSQVSCHFVRCTGKRQVEDETNLERRQFVCGLCRRSFDTMRGMHLHQRSQHPSSYHEMLEAKDVAKRKAYTSDEINLIAMAECRLREKPRLINVYLAGLGLVERSADQIRAIRKSERYQATLASMRNENRDNSQEHEAVDDPQADWSEVFDAHLDKLSASGNSKRSICAINRLIRLRNEIGNVVEVLDDLLRRLYPKIFALRCNPMKKRKEARKDRDDVRRKPSEIKREEYALQQKLWRRNRSKLAKILLDDAPLNPEGPPIEEVERVYLERFGDESPPDEERIEKAKVNRQMGSVLLPITEQECSMVLRQLQNSAPGPDKLKVQHLKLIGSKVLCRIFSIWMRAGKVPMRLKESRTTLIPKSNKDLEDIGKWRPITIGSHLVRLYTKILARRLQGAVTLNYRQKAFRPVEGCAENVILLNSIIKDASTARRRTNLAVAILDLAKAFDTVSHHSVIRALKRQNVPQLLISIVEDLYQDCWTVISLGTDSTSKIRVNRGVKQGCPLSPLLFNLVIDELLDELPDRLGYNIKGVNVKALAFADDLVLIGNSPEGLQSMMETTSEFLKKRGLRLQKKKCTTLGITHTRGRTSATRIRTSPFVLIGEDPVPVIRPGEWTKYLGVQIGPQGTCKLQRNAVRENLERLRKARLKPQQKVFMLRFHFIPRWSYSLAITSQTVNTLNFIDREVRRCVRSIVHAPASLSNDFIHLPTKCGGLGIPCCAETYFFSKLRLKDRLLRSEDPAIAVLAPTLHNKTMECLEKRFRAEAEGGNLKRASTTSARRLRFSEKVQGYGSLHFSDKYCNNWLVGATATLTGRNFVQGCALRSQTLPTRESITRGRPGEGAVCRNCGLQNETQAHILQNCHVTNKARLARHNAVLQVLVARLRKENWRVQEEPIIPTASGSFMKPDVHAVSPSGQHFIWDAAVPYEGNSMSLEVARRAKVQKYASRKSEIAKYLNVPAQSISFDGIVVGARGAVPDATAALCTAIGLGRSELELMSLRALEGSLRIFRLFMAL

SEQ ID NO: 30041 - protein, 1033 aa, Crotalus oreganus
MLTDTVVLRPPGLPDPSCPGSCPRVASPKSDAECPKHSCPCGSEFGTKRGLAMHRFHCHPAEVNAERLTTLPTKKLVWTQEEMDGLLRHANGAWKEGMLKTQIFTSLMPHFPGRSAEAIKKRLQSLKWVPARDNPERNSQPLHATSGNVAPATLPTPDPSRVDDQGANIEDPAASWRRALLAAAADHFKEPKLGAGTLKQITQDLLNGKISSGECRVLMGEHAQHWFPHTWKPSSARPEPKARQWKAREIRRANYAAVQKLYKLRRRDAAQAVFSGSWRNAYRGRAPQPDKMDQYWAEVFETASATDVTPPGSPSEIYWSVVSKITPSEVADALKGMRNSAPGLDRITAEELLTWDHPSLAAYYNLMLAAGGPPEHLACSRVTFIPKVENPQTPGDYRPISVASTVLRAFHKILAWRLRDNLQLSPFQHGFLQRDGCLEATALLHTILRKVHNSRKSCAMLFLDVAKAFDTVSHQTLFRVAVELGLPPPLVNYLKCLYSRSTVRLADKATKCGRGVRQGDPLSPLLFIMVMDDIVRKTLPEVGFDLDGQRVDSLAYADDLVLLAEKSPRLQDKLHLLSEALRKAGMSLNARKSRGLTITKVSKRKQMVITPTTYECEGEPIKPMGTDDSVRYLGLHFNWKGRIVPKHTGKLDSLLKELTKAPLKPYQRLQLLKFHAVPKFTHELVLGHAHRNTVKKLDCLTRAAVRKWLRLPQDTPLGYLHANVKDGGLGIPCFSTSIPLLQKKRFEKIATNPATIFQIMQRQDSFRTQGRRLDKPCRLNSTVVTSKTEVREEWGNMLSNSVDGRELRHPEVDKASHEWLLRPDRVFPRLHMRGIQLRGGLLPTKARSGRGNNRQVTSKTCRGACQNVETLNHILQVCDVTHDARCARHNRVLHRLERLLHKKGLRTTLEPVIPAGSSFIKPDLIIETDTQTYVLDVSVVAGYRMTESWDIKVEKYGRPDRVEAIRKWAAIPATKRVEHLPVIVSNRGLCYQPSGDGLRALGLTSRDISDLCLLAISGSLRCYDLYMRGTRAV

SEQ ID NO: 30042 - protein, 1324 aa, Gopherus flavomarginatus
MMAALASAQLRPSRRANSTILDTEIVPWGRCISRPFEPPMRYHVKVSTVATQTDSPGTTDGVALRRRESTQTLLTAGEMYPIPGTSQTSFTDGVTSGNTFAQTEVEEPLPPLPMEILNSVFGETVRPGTSPRPCVPTTPASEKEGDTEGSATLAENIDNSCVPTDASTVTTTEGDGETRAQGKVLVPLPHDNPSCPFCGDHVGKPTALNVHLKRHHGGKDVAFQCALCGKIDPNPHSILCHIPKCKGLTLQVPAGDWACEVCAKQFSTKSGLSQHKRRAHPVVRNTERILASQPKQNSQRGKHKSCWSADEELLLLDFDKMYSGDRCINKRIAEAIGTKTAKQVSEKRRLLNLYPRATSVTADQGPGASPHYLEARSDAPSPIKGLHSIYMRKVQQRLSKEQQGQQHKGQEKLESEILSAWVAGDPNVRSLVEAASIDVLSSFLAPESGTTKKRARAKVSKPKSGKGKSWMKKRAAKRSTYMRFQHLFENDRCKLASIILDGTERLQCQIPLAEVFQAYKQKWETQTAFQGLGQFKSQTRADNSAFDLLISAKEVIKNIKEMNKNSAPGPDKVSVKDLVRVDPEGDILAGLFNTWLVTGIIPDGIKTCRSLLIPKTMDPEALKDLGSWRPLTIGSIVLRLFSRILTNRLAKACPLNERQRGFIAAPGCSENLKVLHTIMKQAKRDKKPLGVVFIDIAKAFDSVSHKHIMWVLQQRGLDQHVINIICDSYRNVHTRMEIGKELTEPIAIEVGVKQGDPMSPLLFNLALDPLISTLEMAGKGFSVGTHKVTALAFADDLVMLSDSWEGMNANIRILESFCTLSGLKVQAKKCHGFQINPTHDSFTINNCEAWKIGATPLNMIIPGESEKYLGVKVDPWIGFTKPALSEKLDTWLERINRAPLKPSQKLAMLNTFTVPRVIYLADHTDCKQALLSSLDDKIRRAVKEWLHLPADTCNGLLYARSRDGGLGVTRLASLIPSIQARRLHRIAHSEDATIRSIALANDIESEYRKLWLVAGGTQDTMPAITDAVIVDHKLPQHVLDKLTEWEKPAPRVIYPIPCNWRNAEFSQWKDLPCQGSGVSHFENDPTSNDWLTHHKGFSERQFLTALKLRANVYPTREYLGRGKTNSIVRCRHCSAPYESLSHILGQCPAVQGARIRRHNKLCEILMREARKLRWEIYQEPHLRTAQNELRKPDLIFAREGTALVVDVTVRFEYKDKTFSDAAAEKVRHYQSLTEEIRKLTGANKVSYFGLPLGARGKWPVINDRVLSALGLSVSAKGRAARLLSRRALLYTTDVINTFESIGKGFSTPAETKPDGTPKRQKGIS

SEQ ID NO: 30043 - protein, 1326 aa, Malaclemys terrapin
MMEALASAQLGPGRRANSTHLDTDVVPWGRCTFRTFEPLARYRIKVSTVATQTDSHQLTDNEAYPTLKSSKTTITEGEMYPIPGTSQTHTAAGAISCETVAQTEAEEILPALPLEILNSAFGETVGPDTSPEPCVPTTPVSEKERDAEGSETLADGTDDTICVPSSAPTVVVTERECENRVQGKVLVTLPHDNPACPFCGDHVGKPTALSVHMNHHHGGKDVEFQCSLCTKADPNVHSILCHIPKCKGLTPQEPAGDWACEVCARRFGTKSGLSQHKRRAHPVVRNAERIQASQPKQNSQCGKHKSCWSAEEELLLTDFDKMYSGEKYINKLIAEAIKTKTAKQVSEKRRLLNLYRKKTSGTADSGPGAQKHNLEVRSETPISTIGLENSYMRTITNRLRANNQGPLRQGLEKFEAEVLSAWVAGDPNIRSLVETTSIDVLSSFLAPEHEHKHKQKGNTRGRKSKSGKGQSWRQKRATKRGTYIRFQHLFENDRCKLASIILDGTERLQCEIPLEKVFQTYKDKWESRTPFQGLGQFKSHALADNSAFDILISAKEVLKNISEMNMNSAPGPDKVSLKDLVRVDPEGDTLAGLFNTWLVTGIIPDGIKECRSLLIPKTMDPEALQDLGNWRPLTIGSIVLRLFSRILTNRLAKACPINAQQRRFIAAPGCSENLKVLHTITKQAKKEKKPLGVVFVDIAKAFDSISHDHIMWVLQERGLDQHIINIIGDSYRNIHTRMEVGKELTSPIAIDVGVKQGDPMSPLLFNLALDPLISTLEMAGKGFSFGAQKVTALAFADDLVMLSDSWEGMRANIQILESFCHLSGLKVQAKKCHGFLLSPTHDSFTVNNCEAWKIGADGLNMIAPGESEKYLGLKVDPWIGFSKPALSDKLSTWLERINRAPLKPSQKLEMLNTFTIPRVIYLADHTDCKKTLLSSLDDNIRRAVKEWLHLPADTCNSFLYTRSRDGGLGVTRLASLIPSIQARRLHRIAHSEDMTIRFITLANDIESEYQSLWLAAGGTQDTMPAITDPVTIDHRLPQRALELLNEWERPAPRVIYPIPCNWRDAEFSQWKDLPCQGSGVSHFGNDPTSNSWLKHLTGFSQRQFLTALKMRANVYPTREYLGRGKNEYMVNCRHCEAPYESLSHILGQCLAVQGARIRRHNKLCEILTREARKLEWTVYQEPHLRTSKNELRKPDLVFVKDGTALVVDVTVRFQYKDQTFSDAAAEKVRHYQSLTSEISRLTGANKVRYFGLPLGARGKWPKINDRVLSALGLSESAQGRAARLLSRRALLYSIDILNTFSGIGKGLLNSDDTKSVGTQREQLGIS

SEQ ID NO: 30044 - protein, 1191 aa, Eublepharis macularius
MSLFLYMGNHTSIEPIMRETISTGYDKGNFLDVTDPVIAVDHMVSNNNSKTDEMTREVAMDGHPSCWGAEGGIGNASSEGEGLQEVESRGKDGIGKVGDDNHSENGSKEFVVVLPDDNPACPVCGDCYGKPTSLQVHICRNHREEDVKFGCRLCGRVDGRVHSILVHIAKCDGLRQEEKRVLEFVCEFCDSSYETQIGLSQHKRHAHPAERNEERIKASKVIKESMRGKHKSCWTEEEVRLLMELEVECRNEKFINKAIAVKLKSKTAKQIADKRRLIKQLREEPPFGDRMLAPRCEKESVDELKEWYRMVCLKEGYRFKDLEGAQEVLERWMEGKEDIDRRVEDLTIDLLIKFLPDQRYRGGKRKKRMKGRVKQASWMKRRAKKRVEYARLQALFKNNRQRAAALVLDGTSGRKCQIAPSEVHRVFKRKLEVGREFKGLGQFRPFGKAENIGFRELFREEEIWDNLSGMKEGSAAGPDGITVKDIKRMDPGGRLLTCLFNVWLITGSIPEAVKSCRSILIPKVEDEEGLKEIGNWRPLTIGSVILRLFSRVLTKRLQEACPVNPRQRGFISAPGCSENLEILRVVMKNAKLEGKHLGVVLVDVAKAFDSVSHEHIQWVLRERGLDEHIIGLISKTMEGANMRFQVANGETPRIEFKVGVKQGDPLSPVLFNIAMDLLINEISLCEGGYSIGKVNISTLAFADDLAVLSRDWASMERFLDLVRVFCQLSGLSVQMKKCHGWFLSPSQGSYVVNNCESWKIGGESLHMMGPGTEQKYLGIKLDPWRGICKMNSLESVKVWTKRIDEAPLKPTQRIELLKTYMLPRLLYIADHTEASAAQLSPIDDVIRAVVKRWLHLPVATTNSLIYARCRDGGLGLGRLEMLVPQLQMKRLYRLAQSEDLVINEICQLGQVQRRFENLWKSLGGLADEVPSILRDGEVGSKAPCPMPIDYRDLEFERWSSLVCQGSGIALFQDDRISNAWVGVRRGMKERHYITALKMRANVVPTREFLSRGTQGQDCSCRKCKAKYESISHILGQCPTVQNMRIKLHNKICDILVKEAKSQGWMVHHEPHLRSSEGILRKPDLIFVKEDRAIIVDVTVRFEYHIDGLREAAREKVRYYCNLEEQVKRLTGATDVLFMGFPVGARGKWYKDNKRLLKLLGVSTARCLWLAKLISRRVVLYSVDMPNTFLNS

SEQ ID NO: 30045 - protein, 1326 aa, Emys orbicularis
MMEALASAQLCPRRRANSTHFDTDVVPWGRCTFRTFEPLARYRVKVSTVATQTDSHEITDGEAYPTLKSSQTTATEGEMYPIPGTSQTHTAAGAISCETVAQTEAEEILPALPLEILNSAFGETVRPDTSPEPCVPTTPVSEKERDAEGSEALTEGIDGTICVPSNAPTVVQIEGECENRVQGKVLVKLPHDNPACPFCGDHVGKPTALSTHLKRHHGGKDVEFQCSLCNKIDPNAHSILCHIPKCKGLTPQEPAGDWACEVCARRFGTKSGLSQHKRRAHPVVRNTERILASQPKQNSQRGKHKSCWSAEEELLLIDFDRMYSGEKYINKLIAEAIKTKTAKQVSEKRRLLNLYKKGTSEVADSGPGAQRRNLEVRSDKPIPIVGLESSYMRTVNNRLRDHIQGPLHLGLEKFEAEILSAWVAGDPNIRSLVETTSIDVLSSFLAPEHEHKHKEKGNTRGRNPKSGKNQSWRQKRATKRGTYIRFQNLYENDRCKLASIILDGTERLQCQIPLEEVFQTYKDKWESRTPFQGLGQFKSHALADNSAFDILISAKEVLKNIKEMNMNSAPGPDKVSLRDLVRVDPEGDVLAGLFNTWLVTGIIPDGIKECRSLLIPKTMDPEALQDLGNWRPLTIGSIVLRLFSRILTNRLAKACPLNTRQRGFIAAPGCSENLKILHTITKQAKKEKKPLGVVFVDIAKAFDSVSHDHIMWVLQERGLDQHIINIIGDSYRNVHTRMEVGKELTSPIAIDVGVKQGDPMSPLLFNLALDPLISTLEMAGKGFSFGAQKVTALAFADDLVMLSDSWEGMHANIQILESFCHLSGLKVQAKKCHGFLLSPTHDSFTVNNCEAWKIGSDGLNMIAPGESEKYLGVKVDPWIGFSKPALSDKLSTWLERINRAPLKPSQKLDMLNTFTIPRVIYLADHTDCKKTLLSSLDDNIRRAVKEWLHLPADTCNSFLYTRSRDGGLGVTRLASLIPSIQARRLHRIAHSEDMTIRLIALANGIESEYQSLWLAAGGTQDNMPAITDPVTIDHRLPQRALELLNEWERPAPRVIYPIPCNWRDLEFSQWKDLPCQGSGVSHFGNDPTSNSWLKHLKGFSQRQFLTALKLRANVYPTREYLGRGKNQYIVRCRHCEAPYESLSHILGQCPAVQGARIRRHNKLCEILTREARKLEWTVYQEPHLHTSKNELRKPDLVFVKDGTALVVDVTVRFEYKDQTFSDAAAEKVRHYQSLTGEVSRLTGANKVRYFGFPLGTRGKWPTINDRVLSALGLSESAQGRAARLLSRRALLYSIDVLNTFSGIGKGLLNPADSKPLGTHREQMGIS

SEQ ID NO: 30046 - protein, 1331 aa, Caretta caretta
MMAALASAQISPRRGATSTGLPSTGLNMEIVPWGRCIFRPFEPLARYRVQVSSVATQTESPISTDGERHPSLGSSQTITTAGEVYPISGPSQRITTAGAISSVTVAQTEAEAEDMLPALPLEFLNSVFGETVRPDTSPGPCVPTTPTSEKERDAEGSESLVDDRNDTIGVSPTTSTVAVTDGESETRVQGKVLVRLPNDNPTCPFCGDHVGKPTALQVHLKRHHGGKDVEFQCSLCDKIDPKAHSILCHIPKCKGLTSQEPAGDWECEVCAKRFGTKSGLSQHKRRAHPVVRNAERIQASQPKPNSQRGKHKSCWSAEEELLLIDFDKMYSGEKCINKLIAEAMKTKTAKQISDKRRLLNLSSKTKSECADPGPGANTHCLEVRSDEPPTITGLESMYMREVKKRLRDQSKGPQHLGLAPFESEILSAWVRGDPNVRSLVETTSIDVLSSFLAPEHETEGKGKKTAQKPKSGKNKSWMKKRAAKKSTYRRYQHLFANDRCKLASIILDGTERLQCQIPLEEVFRAYKDKWETRTPFEGLGQFKSHATADNSAFDLFISAKEVLKNIKEMNMKTAPGPDQVSLRDLVRVDPEGDTLAGLFNAWLVTGVIPDGIKECRSLLIPKTMDPEALKDLGNWRPLTIGSIVLRLFSRILTNRLAKACPLNARQRGFIAAPGCSENLKVLHLITKQAKKEKKPLGVVFIDIAKAFDSVSHDHIMWVLRERGLDQHMINIISDSYRNVHTRMEVGKELTPPIAIDVGVKQGDPMSPLLFNLALDPLISTLEKTGKGFPVDAQRVTALAFADDLVMLSDSWEGMNANIQILESFCKLSGLKVQARKCHGFLLSPTHDSFTVNNCEAWKIGCDSLNMIAPGESEKYLGLKVDPWIGFSKPALSDKLDTWLERINRAPLKPSQKLEMLNTFTVPRVIYLADHTDCKKALLSSLDDKIRRAVKEWLHLPSDTCNNFMYARSRDGGLGVTKLASLIPSIQARRLHRVANSKDWAIRYIALANDIEDEYKKLWLAAGGDQKAMPAITEPVVVDHKLPEHVLEILNEWERPAPKAVYPNPCNWRDAEFANWENLPCQGSGVSHFGNDPISNDWLKHHPGFSERQFLTALKLRANVYPTREYLGRGKNNHNVQCRHCHASYESLSHILGQCPAVQSARILRHNKLCGILAREARKLKWVTYQEPHLHTAKNELRKPDLVFVKDGTALVVDVTVRFEYKEKTFSDAAAEKVRHYASLTTEVRKLTGATKVKFFGFPLGARGKWPKINEQVLSALGLSESAQGRAAKLFSRRALLYSTDILNTFAGIGKGLLKPADAKPEGTPRRHVGIS

SEQ ID NO: 30047 - protein, 1245 aa, Pleurodeles waltl
MAGCVIVRNGESNEHNTRWGSSWLIKTPLRWRKGVLSLPQISTLLTDFVNFTPRSNNAMNNIELNHITQTNTQDVMSDEESVDLKESIEFLTSSAVNDTLTSKFQNLPDVYEVKDINGKKSDFTKKVTFWKYPNDKFNCDLCGDIMGTFKELKKHVSNKHKGFCLKTYCSKCDKEAEYHNIACHYAKCKGRPKKGELQFLCSYCDLRFGTKIGMSQHIRHAHPRAQNDARLAALANSKPSKLWSQEEILLLAELEKLYENKRNINALMVPHFTNKNRKQIAEKRRDRRDKRKKQAMDAEQSSNNSDNDANDEPETSESTTKERRKDFINKKRAPKIANFSELNDRITEAQRYSKNVQHHEAALVLLEEIVRYISENTGDINPRPVPSNEQPIESGTERMNTAEVEQPSTPTNNKISKKDIRNKNLNKSHRKRYAKAKGSYKEYQAMFKKDKKKIARIITDGAEDATCQISADVIFEYYKNIIETENKKNPKFQQIDRIPEEWDFENLCQDISLREVTRAFEESNLNKAVGPDNIGLNDLFKVHNKEPRMLPKILSTWLNMRMVPDCIKRNRSILIPKNVPIEELDKISNWRPITIGTAFMKLFTKILTKRLDFFVNLNTRQKGFMKVRGCLENLTLLQNIIKGARKNKHSLAVVFIDISKAFDSVSHGHIIRSLERHRVPSSIRDLIKDLYTNSNTSFKGKNNISTPELTMRSGVKQGDSLSPLLFNIAMDPLICDLQKNGKGFTFGSDGIFEQITALAFADDIAVLSNTWDGMSTNLKIIEKFSKTTGLKLNVKKTHGFLISHNKDKILVNNCKPWQFDKQNIENIHPGESERYLGLNFDPHTGYTKNSKANEVLTSWAEKLDNLPLKPTQKVEILCQYLIPKMSFKLEMTGTEAKTLNIMDQTIKKYVKLFLHLPAYTCDGLLYSKRSNGGLNVPKLCTAIGINKVNNLLYLRETPDLYIAHSYMYAGEIINEKIDQTIKTHKLNILDSSCLSYDLQLLAKYDWRKEEFDKWKNLPVQGDGAKYLENNPTSNFWIRKHSKLKENQYIAALMLRSNVLQTRETITRGRNRTFSTCRYCKDVCETIAHISGTCPKTKDIRIKRHNKILELLIDRAKRCGWMTYREPHIKNNQGELRKPDVVFTKNGTAVVIDVSIRYENSHNSLEIAFEEKVNYYKELSQQIKDLTNCTDVKFHGFIIGCCGIWPNCNDVALADLGLQMSFPFKKNVCLTTLMDTLKMCQVFMDN

SEQ ID NO: 30048 - protein, 1047 aa, Aspidoscelis tigris
MGGVSLLVTINKKKNSPGPSGLQASSRNNEVAGAPGAPAPPSDSFDCSCGRVFPSKRSLAMHRFHRHAEELNEERSARLPTKKLTWSKEEDSSLVRHASRLWAPNLLKKHLLDLLAPLFPGRSTESIKKRLQILKWLPPTTPTEASSTSSQDATSSSTQNATSTSNQEATIQDSTPTPSWRDDLLDFAVKNLQEPKLGSDDLRIIASELQSGTISCADAAQLLEDHARHWFPHTWKPSKEKHHSLDPSASKKQVRRANYAAIQRLYHLRRKDAASCVLSGKWRRAHRGPTAKVDGLDEYWSEIFELPSAPDHCVTGPSKDKDWSLLGVISAAEVTSALRDMGNSAAGLDRLTPSTLLTWDQPSIAALFNLILATESVPRHLAKSRVIFLPKSEDPASPSDFRPISIASVLLRALHKILARRITSTLKFSQLQHAFLKRDGCLDASSLLHAVFRKVHDNRVPVSMVFLDISKAFDSVSVHTLLRVAKSSGLPPPLTNYLDSLYDRPCVQLESRTSICGRGVRQGDPLSPLLFIMTMEVLLQSSIPEIGFDLDGNHIPALAYADDLVLFAEKPERLQEKINGLFGSLSSAGMTINAKKSMGLTVAKDGKHKTMVLLPHAYMSGSTPIRPMGPSDTTRYLGLEFSWKGKVTPKHTSKLDQMLQEISKAPLKPYQRLDLLKNFAIPKLTHELVLGNAHRNTLKKLDVLVRASVRSWLRLPKDTPLGYLYAHVRDGGLGLPCLHTSIPVLQKNRFAKLLSNPGSIHKAITSQKSFRVVQRRIDLPVTIGGHLVQSKKDARAAWLNDLKRSVDGKDLFGDPIDPVSHRWVSHPQRVFPRLHLRGIQLRGGLLATRARNARGRNLDGTPKTCKGLCGQTETINHILQVCDRTHDARCARHNRIVQKLQRFLRKKKIPTWVEPMIPSGHSYIKPDIIATINNELLVIDVSIVSGPRLSESWQLKSSKYGSSTNTTAIQAWHGSPITVRQAPLIISNRGLLFAQSGQALRSIGLTSRDMTDLCLLAIIGSLKCYDSYTRSTQDYKLQRGGQHAGNS

SEQ ID NO: 30049 - protein, 1090 aa, Aspidoscelis tigris
METTLVSIRAKIQATPLLWANHPLEGFLLVMKRKEMTSPGPSGPQGNSRDNDAVGVPSIPACPPGDFTCPCGRTFPSKRSLAMHRHHSHPAEVNEERTTRLPLKRLAWSQEDDSALLRHATRLWAPSLLKKKHLELLAPLFPGRSVEALKKRLQILKWLPPPPPETVSSPGTTPTMVSPPAFIRSPETPTIVFPDTPSMVFPDTPTMVFPDTPTVVFPDTPTLDVQETQPPTSSWKVDLLDFAARNLREPKMGADDLLNITSKLQSGTVSQSEAAHLLNEHAKRWFPHSWAPSKRTHRSLGPAPSNRQLRRANYAAVQKLYHLRKKDAASCVLSGQWKSAHRGSKDTIDGLEDYWSQTFEHPSATDPRDPRTPEDTAWTLLDTITAAEVTSALRDMGNSAAGLDRLTPATLSSWDQPSLAAYFNLILATESVPKHISKSRVIFLPKTDEPTAPSDFRPISISSVILRAFHKILARRITSTLQFSKLQHAFLKRDGCLEASSLLHAILRKIHEDRTPASLIFLDISKAFDSVSIHTLLRVAKSSGLPPPLTNYLVSLYDHPRVKLEAREVTCGRGVRQGDPLSPLLFIMAFEDILQSALPDIGFDLDGHNIPALAYADDLVLFARRPERLQEKLDILVDSLAAAGMSINAKKSIGLTIAKDGKRKTMVLLPHIYRSGSTEIKPLGPSDVTRYLGLDFTWKGKVSPKHTSKLDQMLLELTRAPLKPYQRLDLLKNFAIPRLTHELVLGNAHRNTLKKLDVLIRSAVRSWLRLPKDTPLGFLHAHIRDGGIGLPCLNTSIPILQRNRFAKLLSNPEPIQKVVANQKSFRVIQRITNRPVQIGNHIIQSKKEARTAWKNELRRSVDGRDLFGDPVDPVSHRWVSHPQRVFPRLHLRGIQLRGGLLPTRTRNARGRDPPVTSTSCRGLCGQAETLNHILQVCDKTHDARCARHNRIVHRLSQLLRRKNVPCWIEPIIPAGATYIKPDIIAKVNNELLVMDVSVVSGSRLNETWSIKTEKYGSSKSSTALQSWHGSRIPLRHYPIIISNRGLLFAQSGQALRSIGLSARDLTDICLLTIIGSLKCFDHYTRSTLDL

SEQ ID NO: 30050 - protein, 1282 aa, Mauremys mutica
MPQARVSFPLVRVSFPLRRVNLGDMEKSNFYLNTGVALDRVKNAPAAGFDAPAGSVKYIRGVIRITGPMTKAEGTEMMPQAAEVEDMVPSVEERIMEGEEEDFSKNQVDEILTILPMVFTGEAFNDLKKDEVNLDFKYLSKFEDPYFIEPGGCYSVLMRGFNVKVNSIPLDGDLNRGFNEDLVKGAKVIESSSWKEGVFYLEYPVDCFNCPICPQVLATFGKWAKHINVVHKSKAIRVLCKKCGKASQYHSIACHYPKCRPREVDTLSGSHACSACGLAFHTKSGLSQHCRHRHPAIRNEQRINEKVRNRIKESSARVRIWTEEEIEQLIVLERKYIGKRNINKCIESELKTKTNKQIADKRRELAKKKQETAQIEEIEVEKIVDSILEVPPPRERILPLRRDPEVDPRGLVSRWGKQSREGKDILNGLRVVEELLQEDSTKRLGWAELEKICISLVDGRKLGEDEQVETRIEGRRRKGIGKGKKKQSNALRRYATQKAKYRFYQQLFDKDRRRLARIIMGEPDKVNCEIPMEEIERYFMDILGNIGHGNIVGWPSSMERADNDLLMSPISVDEVRSVLREIKKDSAPGPDKVKISDLREIFNIDSLIITRIFNIWFLNGQVPDVFKENRTILIPKTDDVEELKKLTSWRPLTIGSVWVRLYTKILAKRLSEAVRICDRQKGFIAAPGCEENIAILDNLIKGAKRKGEEIAIVFIDLAKAFDSVGHGHIIAGLKRFDVDERFIGIVRDLYFNCTTRVWVGDKFTESILIRRGVKQGDPLSPILFNIALDPFLTRLELEGSGFTVQGQSITSLAFADDVAILSGSYLGMIKNLSILQNFCRNTNLRINVSKTKGFHIWPKHKTYLVNPKSRWMIGNEEIQYVMPGEFEKYLGARIDPWIGIGGSLLKEKLVKWSESLSKAPLKPAQKLLILQTYVLPRLFYNLLLMEPPFCVLNDLDVLVRKIVKEILHLPQCTTDGLFYSRRRDGGLALTKFSVQIPNMLLRKWRRHIVSKDSWVDLSYVYAGENLVDKIIVFSAATPHPRKWREEEFLRWTELRCQGIGVKYFRNDVTSNSIFRNSDKIKSSVYIAALQMRANIYPTRETLARGRGGVTALCRWCGKVKETIPHISGQCYKTKEMRIKRHNRVVSVLIDRVVKVGWKAVVEPHLRNEKGELRKPDIVFTKGDTAVVVDVTVRWEDNDGSLEQAHRQKATYYSELENNIKELTGVNNIHFFGFVIGVRGKWSDGNDELLQILGIDRGKNFKESVSRLVLYSTIDMMAVFSDR

SEQ ID NO: 30051 - protein, 1325 aa, Mauremys mutica
MMAAPASAQLSPCRRANSTILDTEIVPWGRCLSRQFIPPMRYRVTVSSVATQTDSPGTTDGVAPLTRESTQTLTTAGEMYPISGPSQTYRTEGVISGTTIAQTEDWEPLPPLPLEFSNSVFGETVRPDTSPEPCAPTTPASEKEGDAEGSTTLADEIDNNNCVSTDASTVLTTEGDGETRAQGEVLVQLPNDNPACPFCGDIVGKPTALHVHLKRHHGGKDVAFQCALCGKTDPKAHSILCHIPKCKGLILQVPAGDWPCEVCAKQFSTKSGLSQHKRRAHPMVRNAERIVASQPKQNSQRGKHKSCWSADEELLLLDFDKMYTGERYINKLIAEAMKSKTAKQVSEKRRLLKLYPRASAETADPGPGATSHSLEARSEVPSPTEGLHTTYMRKIRQCLSKQKPGPDHQGLAQFETEILSAWVAGDPNIRSLIEAASIDVLSSFLAPESEPKSDNGKATVSKAKSGKEKSWMKKRAAKRHTYLRYQHLFENDRCKLASIILDGTERLQCQIPLEEVFQAYKKKWETQTPFQGLGQFKSQTQADNSAFNTLISAKEVIKNIKEMNRNSAPGPDRVSLKDLVRVDPEGDILAGLFNTWLVTGIIPDGIKTCRSLLIPKTMDPDALKDLGNWRPLTIGSIVLRLFSRILTTRLAKACPLNERQRGFIAAPGCSENLKILHTIMKQAKREKKPLGVVFVDIAKAFDSVSHQHIQWVLQQRGLDQHVINIICDSYRNIHTRMEVGKELTEPIAIEVGVKQGDPMSPLLFNLALDPLISTLEMAGKGFSVGTQKVTALAFADDLVMLSDSWEGMTANIKILESFCTLSGLKVQAKKCHGFQVTPTHDSFTINNCEAWKIGADTLNMIIPGESEKYLGVKVDPWIGFAKPALSEKLDTWLERINRAPLKPSQKLAMLNTFTVPRVIYLADHTDCKIAHLSTLDDKIRRAVKEWLHLPANTCNGFLYARSRDGGLGVTRLARLIPSIQARRLHRIAHSKDETIRCIALANDIESEYRKLWLAAGGTLDTMPAITDPVIMDHQLPQHVLEQLTEWEKPAPRAIYPIPCHWRTAEFSQWKNLPCQGSGVSHFENDPTSNDWLTHHKGFSQRQFLTALKLRANVYPTREYLGRGKSNSIVGCRHCSASYESLSHILGQCPAVQGARIRRHNKLCDILTREARKLQWTIYKEPHLRTADNELRKPDLIFVKEGKALVVDVTVRFEYKEKTFSDAAAEKVRHYQPLTEEIKKLTNASEVSYFGLPLGARGKWPTINERVLSSLGLSESAQKRTARLLSRRAILYSTDILSTFESIGKGLSNPADAKPEGTPNRQRGIL

SEQ ID NO: 30052 - protein, 1267 aa, Xiphophorus hellerii
MNMMHTIMTGQDHPSGVSKRVPVRLGTGSTLRWRSCPACLFEVGHVWNWRINLPSGRWDQPLGGLSRVPTGTGATASSPPLLRGKSVSVGTQVQESDWLMLPEESSVVTESMAEAAPEMRVEAAEVVLAPQLGQVVGAMYTLPEVVGDDSPRVRAVALNEVRVLLPWLASDCPLCGVQVKGIVALGKHFAIRHGGVTALYVCGRCGRSSSSRHSISCHVPKCGGGMATAGVEGEQPSGFACDLCEARFPTPVGVSQHKRHAHAAEWNEVRLAKRKVPGGEIKATKLWSVGEIQTLIRLIREHGDSVATYQLIADELGNGKTAEQVRSKRRNLKIDMAGDGPHEAEEEDCHPVTEPIPQAVQSSAPSPQVMSSDMIREALASWGDREGGEEVRAIAALVRDVDQNPLLIESSASDLISKLGGGVERTSRAPPPVREQNQARGWARRLAQRRREYRECQFWYSRDQARLAARILDGAESQECAIPVDQIYEAFRERWEGGGQFHGLGEFRTDAVTDNWEFYKPILAVEVMENLTKMENGTAPGPDRISKKALLKWDPRGEQLARLFTAWLIRGVIPRAFKECRTTLLPKSTDIGELQDVNGWRPVTIGSMVLRLFSRILTMRMARACPLNPRQKGFLASSSGCAENLLMLDEIIRRSREDGSPLAVVFVDFAKAFDSIAHEHILSALGERRVDPHVIELIRNSYVDCATRVNCVGGRTQLIHMNLGVKQGDPMSPLLFNLAMDPLIHRLEQARFGIRWGEQTTDHLRGDRGFSTLVFADDLVLVAGSVEAMHGSLGILEEFCQLTGLSVQPKKCHGFYMDKGVVNGCEAWRIGGTPIHMIPPGESVRYLGVQVGPGRGIMTPDLIPMVRKWVMRISEAPLKPSQRLRLLNAFAIPRLMYQADLGKVPSTKLSQIDGLVRKAVKQWLHLPPSAGNGLLYSRVRDGGLGILRLERLIPSIQVRRLYRMSRSPDFWTRTLTTHAVSQSDWERLWTKAGGDAGSVPVMGTGEANPADAGSPPVYPDWRRGENLAWAALEVQGVGVDQFRGDKISNSWIADPTAVGFRQRHWIAGLALRTSVYPTKEFLARGRDKAGAACRRCLARLESCSHILGQCAWVQGSRIRRHNKVCELLATEAGRYGWTVTREFRVDGPEGGLRIPDLVCKKDDTVLVIDVTIRYELDGDTLARAASEKVAHYQPVAAEIARRIGGRCAKVLGFPVGSRGKWPSSNNTVLRELGIPVGRRRAFARLVSRRTLLYSLDVLRDFLREPEG

SEQ ID NO: 30053 - protein, 1350 aa, Gambusia affinis
MQGRGGLISHLWYILITDTMKVPIVVYGQDHPSGLSKWVPVRLGTGSTLRWRSCSACVLEVGHVWNWRINLPSGRWDQPLGELPRVPNGTGATASSPPLPMRKTISVAIQVQESDWPICPEVPSVVSESTAYAGSARSVESVEGAREPQPGEVDVVSESTAYAGSARSVEPVEGARDPQPREVEVQERDWPILPEEPSVVSESTAYAGSARSEEPVEGAREPQPGEVVGAVYTLPEVVRADSPRVGADTLNEVRVLLPWLASDCPLCGVQVKGIVALGKHFAIRHAGVTAMYVCGKCGRSNISRHSISCHVPKCGGGVAAAGVEGEPASGFACDLCDARFPTPVGVSQHKRHAHAAAWNEVRLARRKVPGGEIRATKLWSVGEVQTLIQLIREHGDSIATYQLIAVELGNGKTAEQVRSKRRLLKIDMAGDCSNIAEEEDCSLSDPIPQAERSSPPSPQVLSSDRIREALVGWGDREGGEEVRAIAALVRDVDQNPFLIESSASELISKLGGGVERTGRARPPVREQNQARGWVRRLAQRRRAYRECQFWYSRDQARLAAQILDGAESQECALPADQIYEAFRERWEGGGQFHGLGEFRTGIVSDNWEFYKPILAAEVMENLTKMSNGTAPGPDRISKKGLLDWDPRGEQLGRLFTAWLIRGVIPRAFKECRTTLLPKSTDPGELQSVNGWRPVTIGSMVLRLFSRILSMRMARACPLNPRQKGFLASSSGCAENLLMLDEIIRRSREDGSPLAVVFVDFAKAFDSIAHEHILCALGERRVDTHVIELIRNSYVDCVTRVNCVVGSTQPIHINRGVKQGDPLSPLLFNLAMDPLIHRLEQARFGLQWGDQGRISTLVFADDLVLVAGSVEAMNGSLGILEEFCQRTGLSVQPKKCHGFYMDKGVVNDCEAWRIGGAPIHMIPPGESVRYLGVQVGPGQGIVTPDLIPTVRSWVMRISEAPLKPSQRLRLTNAFVLPRLMYQADLGKVPSTKLAQIDGLVRKAVKQWLHLPPSAGNGLLYSRVRDGGLGILRLERLIPSIQVRRLYRMSRSPDLWTRTLTKRAVTQLDWEKLWIKAGGDAGSVPVMGTGEANPPDAGSPPVYPDWRRGENLAWAALEVQGVGVDQFRGDTISNSWIADPSAVGFRQRHWIAGLAVRTGVYPTKEFLARGRDKSGAACRRCSARLESCSHILGQCAWVQGSRIRRHNKVCELLATEAERYGWTVTREFRVDGPEGGLRIPDLVCKKADTIFVIDVTIRYELDGDTLARAASEKVSRYLPVAAEIARRIGGRCAEVRGFPVGARGKWPSSNNTVLMELGIPVGRRRAFARLVSRRTLLYSLDVLRDFLREPEG

SEQ ID NO: 30054 - protein, 1155 aa, Schizopygopsis malacanthus
MWATLGRANLPTQGTKLVTDNKNKKKPGPSGIQVHSNSEIEARADNPTLDQGTITCEDCGRAFPSLRSLGMHRHHQHQEEVNEERVKLLQKKRRLWSKAEDEKLLDLANEEWTEGMLKKDHLALLQAFFSHRTTDGLKKRLQHLGWRPSQVPLQEQVLPTAVSTQLPAPSRPTRTISFATATPMLPSLRRAMKWTSEEDAKLQAQANEIWRPDLLKGDLAKSLDAITKGRTAGAIRKRLQLLKWISPELALPRSPQNNTEAGEVETEDAANDGGTSPTTGALENRDSGELTTGLSPEEGWRAKLLETALATLEDPRVGTQKLKGIAEGLLGGWVSIEQAAQSLESAIQECIPLKWNPVKRRRVFGKKPRSNREIRRARYAHTQRLYKLKRKDAAHSILEGRWREAYRGMDCAVEGVEDYWAKVFETSTTETEPSEASPQSSGQIKWELVSPITTEEIRLALNTMRKTSVGMDKLSSQELLTWHLPSLAGLMNTILAVERLPSHLATARVTFLPKVDSPVEPGDYRPIAISSVLARTLHKILARRMRDHFKFSPLQYAFLQRDGCLEASALLHAVLRRSHEEVKPMAAAFLDISKAFDSVSHNAILAAGRKAGTPPPLLSYLSHLYQNATLHLGTSYTNCKKGIRQGDPISPILFILAMGEVLEEALPEVGIGWGAEQLGSIAYADDLILLADTLGDLQMKLDGLCKGLSKAGMALNIKKSATLTILKDGRRKHLLLAPSTYESKDGTIPAMGVADTQRYLGVYFTWKGRTTPKQTKEVERMLMEITSAPLKPYQRLEVVRDFLVPKLQHELVLGCAHRNTIGRIDKMIRGSIRAWLRLPKDTSLGFLHAPVKSGGLGMPSLGTTLPLLQKRRFEKLLSCQTSTERTLVKRPSFQSTLRRVNLPCRVGKETVFSPQDGNEEWTRVLVSSADGRSLVTDDIDPASYHWIRKPHSVFPRLHLRGIQLRGGTLFTKARASRGRERSSEEVACRGGCQARETLEHILQSCEVTHNARCARHNRIVKLVEKGLRRKVERTWIEPIIPTIRSFIKPDILVETEHHITVLDVSVVANPRMEMSQQLKVGKYGSQENTEAIRAWIDSDKPIKHQPVILSSRGLMYGPTGRGLRSWGLTTRDLSDLCLLAVAGSLKCYDTYTRGT

SEQ ID NO: 30055 - protein, 1113 aa, Schizopygopsis pylzovi
MRATLGRANLPTQGTKLVTDNKNKKKPGPSGIQVHSNSEIEARADNPTLDQGTITCEDCGRAFPSLRSLGMHRHHQHQEEVNEERVKLLQKKRRLWSKAEDEKLLDLANEEWTEGMLKKDHLALLQAFFSHRTTDGLKKRLQHLGWRPSQVPLQEQVLPTAVSPQLPAPSRPTRTISFATATPMLPSLRRAMKWTSEEDAKLQAQANEIWRPDLLKGDLAKSLAAITKGRTAGAIRKRLQLLKWISPELALPRSPQNNTEAGEVETEDAANDDGTSPTTGALENRDSGELTTGLSPEEGWRAKLLETALATLEDPRVGTQKLKGIAEGLLGGWVSIEQAAQSLESAIQECIPLKWNPVKRRRVFGKKPRSNREIRRARYAHTQRLYKLKRKDAAHSILEGRWREAYRGMDCAVEGVEDYWAKVFETSTTETEPSEASPQSSGQIKWELVSPITTEEIRLALNTMRKTSVGMDKLSSQELLTWHLPSLAGLMNTILAVERLPSHLATARVTFLPKVDSPVEPGDYRPIAISSVLARTLHKILARRMRDHFKFSPLQYAFLQRDGCLEASALLHAVLRRSHEEVKPMAAAFLDISKAFDSVSHNAILAAGRKAGTPPPLLSYLSHLYENATLHLGTSYTNCKKGVRQGDLISPILFILAMGEVLEEALPEVGIGWGAEQLGSIAYADDLILLADTPGDLQMKLDGLCKGLSKAGMALNIKKSATLTILKDGRRKHLLLAPSTYESKDGTIPAMGVADTQRYLGVYFTWKGRTTPKQTKEVERMLMEITSAPLKPYQRLEVVRDFLVPKLQHELVLGCAHRNTIGRIDKMIRGSIRAWLRLPKDTSLGFLHAPVKSGGLGMPSLGTTLPLLQKRRFEKLLSCQTSTERTLVKRPSFQSTLRRVNLPCRVGKETVFSPQDGNEEWTRVLVSSADGRSLVTDDIDPASYHWIRKPHSVFPRLHLRGIQLRGGTLFTKARASRGRERSSEEVACRGGCQARETLEHILQSCEVTHNARCARHNRIVKLVEKGLRRKVERTWIEPIIPTIRSFIKPDILVETEHHITVLDVSVVANPRMEMSQQLKVGKYGSQENTEAIRAWIDSDKRLSINPSYCPVEA

SEQ ID NO: 30056 - protein, 1242 aa, Schizopygopsis pylzovi
MYQGYTAYLLGGSNYDCYMARAPPRGDRWIGWEALVIPTTGGGCQVGTPAYNPPELRSGPSQSGQPPAWDFLLVTRKKKLSKNPGPSGNQDYSSGEAVKEAGTFESVSGPISSDNTCEDCGLTFPSSRSLGMHRHHRHPVEVNQERITVLQGRRKGWSNGEDNELRAKADSIWRVGMKKKDLLTHLHVTFPHRTLEALKKRLQLLKWTCTVTSREHQQHSPPRDNVPDQGDQMSIGPTRMTEVDDLPSRNNIQQDIPLLASAAIKLGKSTKNWSEEEDILLTEEATKIWVMGTTKRELANKLHSRFRSRTVEAIRKRLQTLEWTVPTVVHQREPSSVYRPHRPEGSPTSLSPPPQLATSPQTVMLVQSTPLQEDTGTSRVVQPVNVEQWRKDMLEKAYHSLKSDRFQPERLRKWILDILEGRLTKLEGVKLLKEHTAKIFPTRWLPAPPLRTSGKVLRSNKQLRRARYASIQRLYKLRRKDAAKTILEGRWKDAYKDKHRVDGLEEYWTKVYAGTGHSDEPVLTTEKGEQRWEILSPITATEIEDALKGMGNSAVGMDRVSSRDLLRWHQPSLAGFCNVILALETMPSSLANARVTFIPKVELPETPGDCRPIAVSSTLTRALHKILARRMRDTFTFSPLQYAFLQRDGCLEASMLLQALLRGTHDGGTPIAMLFLDIAKAFDTVSHDTILEAARSAGAPEPLVNYLANLYEEAEVNLGTRMTKCGRGVRQGDPLSPILFILVMNKEVKAACPEKGVELGGQIINAIAYADDLVLIAQNSEDLQLKLDGLCRALRGMGMTLNERKSKAITILKDRRRKCLLLDPHSYSTDEGVIPAMGVLDKQHYLGLDFTWKGKVTPKHTGHLEKMLHEITTAPLKPYQRLEILKIFLVPRLVHELVLGGAHRNTLLKIDKMVRTAVRKWLRLPKDTPLAYLYSPFQAGGLDIPSISNTIPIWQRSRSMKLLSSPNPIERALTEMPSFQKALKRMNRPCRVGGEAITTVKEAREMWAKQLAQSVDGKDITMTDVDAASHLWLEKPERVFPRLHLRGIQLRGGVLSTKARRARGRESSTDDIMCRGACQVRETLNHIQQRCDVTHDARCARHNRVVRRLESMLRGRASNVWVEPIIPTAKTFIKPDLLIHKSEKVMVMDVSIVVGSRMEETWRLKTQKYSTPENERAITSWLQHTHNSLEHMPVIISYRGLMYGPSGRALRNQGLSKRDISDLCLLTVAGSLKSYDLYTRGT

SEQ ID NO: 30057 - protein, 1208 aa, Gila orcuttii
MIMSNNSNPILAGTSPRIIRCLAVASGLGGCGLVRSPCGPGARDRGGGSGSPGDRNYAAEFGLRECSVVLTRLGAGQSATVMRTTPGRDQLEGPSSVKETPDMGQPVADPGGDPRQVPPADERQEEVPGVVIILPLQDFTCTLCGVSASTWTWVQRHFATRHGKVPVRYSCNSCGKTSHLGQAIACHIPKCKGPRMAEPEGLIRCEGCAATFATRRARSIHELHVHPNIRNRKRIEEGKRRDGSAGRQTGVETGGRAVLPVSRGASPDGEVPSTSGISARERGVPLEPIASSSVPPRQPNLPEGGLLRLFQEEARKMVSEVGGDGTDYIHVLAAWLDDNDQLPALVEAATHRILQGCDPRRRGRPAIRNRRAIVAPRQSRLRRHKTLAKSRAYHTCQYLYKKDRARLAKKILDGKKGQRCTISQETIYSTFQAKWEFPAPFGGLGRFGAWVSADNTHLVGPISQGEIRTCLQLISNASAPGPDGIGKQEILNWDPKCETLTRLFNMWWFTGVIPKSLKKSRTVLIPKTSDPGAVMEVGSWRPITIGSMILRLFTRVINKRMQETCPIHPRQRGFRPSPGCAENIEVLQDLIRHCKEDRSQLAVVFVDFAQAFDTVSHEHILSALRQMNVDPHMIGLIQQIYTDSTTYVEIGSGATPDINVRVGVKQGDPMSPLLFNLAMDPLIHGLERFGKGYTVEGHSVTTLAFADDLVLVGGSWSDMAHNLLLLDEFCQNTGLRVNPRKCHSFLVRPCSGAFTVNDCAPWVLGGKALQLTSIEDTVKYLGVKFNPWGGVDVPDLEVILDKWCQKIGRSLLKPSQRVVLLNQYAVPRLFYQADLCEVNDRVLQSLDGTIRRSVKKWLHLPPSTCDGLLYARNRDGGLGICKLSRQIPSTQVRRFFSLAHSSDPLIRKLTDNSRVRAKFVGMWRRAGGDADNLPSLDGADSNDRGDTTGSLTSHHRVCPVPSDWRHDEFLRWAGLPTQGVGILGFHRSTASNAWLGNPVGFTQRQYIAALQLRACVYPTQEFKHRGRRKEGAACRRCSYRLESSSHILGQCPAMQEARIARHMKLCRLLGAEAEGHGWEVRQEWEFRTLHGDLRRLDLVLTRDSKALAIDLTVRYEFAPDSLSNAAQEKLDYYGPHREVIARELGVGEVEVIGFPLGARGLWPVGNYRTLTAIGLSRARVRSFSRLMSRRTLLYSLDVLRTFQLSLRS

SEQ ID NO: 30058 - protein, 1071 aa, Ahaetulla prasina
MQAWTPPRGDRRGGYLVPKPRSKPPLCMPYRPSRGIATGYLTIVYSPSPSGHMDSSDKDGNAIGAGTQNRADNPRYPCFCGSTFRSKRGLGLHRAHKHPAVLNAERLAVLPTKRLTWTQEDDEALKRLSDKHWERGMLKKDLITLLTSYFPDRSFEAVKKRLQLTKWAPPEENPERLERPHRAETPERVDAHLADPTETLQSHGPDPTTATSWRRALLVAAADRFKETKLGAEELNQMVRDIQTGELSRKQCRARLRQHAKQWFPHKWKPSKPKPANASCLKNKKAIRRANYAMVQKLYRLRRRDAASTVLSGRWRNAYRGPAPLPPEMEEYWASVFQTPSANDDRSPAEPAAVLWSLVAAITPSEVTSALNGMKDSAPGLDKIPAEELLTWDQPSLAAYYNLLLAAGGPPKHLSCSRVVFLPKTDEPSAPGDYRPISIASTILRAFHKILAWRLRDTLQLSPLQHAFLQRDGCLEASTLLHSIFRRIHTSRVPCAMLFLDVAKAFDTVSHKSLFRVAYEAGLPPPLVSYLQHLYKRSSVKLAETTKCGRGVRQGDPLSPLLFILVIDDIVKRSLPDVGFDFDGQRVGSLAYADDLVLFAEKSTRLQEKLNLLSEALQQAGMALNAKKSHGLTIARDGKRKCMALVPTTYECKGDTIQPLGTDDQVRYLGLQFNWKGRIVPKHTGKLDSLLNELTKAPLKPHQRIKLLTTFLVPKFTHELVLGHAHRNTLKRLDCLTRAAVRRWLRLPTDTPTGYFHANVLDGGLGLPCFSTSIPLLQQKRLEKIALNPATLFQIVQRQDSFRSLAQRMDRPCRLGGAVATTKAEVREGWQIMLSASVDGKELSIPQVDKASHEWLRRPARVFPRLYIRGIQLRGGLLPTKARSARGNNRQVTDRTCRGACRAPETQNHILQVCELTHDARCARHNRVLRTLEKQLRRTEARTRMEPVIPSGSSFIKPDLIVEAANQMWVLDVSIVAGYRMEETWGIKARKYGREDRVADIRRWADVPEHTPVFQMPVVISNRGLLYGPSGEGLRAMGLSRRDLTDLCLLAISGSLMCFDLYKRGTKDWKD

SEQ ID NO: 30059 - protein, 1326 aa, Aldabrachelys gigantea
MAWIARRIAEDGPTSFGCVVGLGNPFIFAPLVRAASPRYGLDSPRYGLVPPGKGSLPQVRVRFPLVRVSFPLVRVSFPLRRAYLLAMEKRNFDSYTGLALDRVKNAPAAGFDAPVGSVKYIRGVIRVAGPMDKTGGTLMMSQMYETEYLIPPVVPRVVEEEVEDRSSKDQGEEILSILPMVFTGSAFNNLFMDEGEPNFKYLNEFEDPYFRDPAFLNCELQKDLNYAGSNSDLVVKRNDGVFYLEYPVDKFNCPICPQILASFGKWAKHINVVHQSKAIRVVCSKCGKSSQFHNIACHYPKCVPREVDTPRNSHACSICGLVFHTRSGLSQHCRHRHPNERNEQRKEKVGVRRKVQGGVSRNKVWTEEEIKQLVVLEEKYAGKRNINKCIELELKSKTNKQIADKRRELAKKRLVVDTELVGDLAVGGLLVDVLEVPPPRERIVPLKVHQELDQIGRICRQGKQNREGREIRRSLEEIEGLLMEDSTKALGWAKLEKVCFSLVEKEGRGVEGQVRMRSVMDGVREKGKKRQSNALRRYATKKARYKFYQLLFEKDRRRLARIILGEPDRVTCGIPMEEIEEHYRGLLCEVGHGSMVGWPSSAEVADNDLLLSPISADEVRDVLRDFKKDSAPGPDKVSISALRDVFNMDSLILTKIFNMWFLEGQIPKVFKENRTILIPKTKDEEELKKITSWRPLTIGSVWVRTYTKILARRLSEAVKICARQKGFVAASGCEENISILSNLIKGAKRNGDEIAIVFVDLAKAFDSVGHGHIVAGLKRFGIHSHFIEIIRDLYEDCFTRVWVGASCTESILIKRGVKQGDPLSPILFNIALDPLLTKLEREGSGFYVQGNMVTSLAFADDVAIVSSSYLGMQRNLGILEEFCKSTNLRVNVNKTKGFHILTKYKMYVVNPKDNWQLGKEMIEYVQPGSFEKYLGAKIDPWIGVGGSGLKEKLVEWSDRLMEAPLKPSQKMLILQVYVLPKLFYNLLLVEPSFNLLEDLDLLVRKKVKEILHLPQSTTDGLFYSRGRDGGLALTRFSIQIPNMLLRKWRRHVVSKDSWVDLSYLYAGDNLIDKIMELGAVTPHPRKWREEEFLRWSRMRCQGIGVKYFQNDRISNTIFRRSDKIKPAVYIAALQLRANVYPTRETLSRGRIGHNALCRWCGKVKETVPHISGQCYKTKEMRIKRHNRVVLALVDKVGKLGWKVLVEPHLRNSNGDLRKPDIIFVKGDTSVVVDVTVRWEDNEGSLEQAHEDKVTYYLELENEIKILTGGKNVHFFGFVVGARGKWSERNEDLLKVLGMDRGKNFKESICRMVLYSTVDMMAIFSDR

SEQ ID NO: 30060 - protein, 1088 aa, Ascidia mentula
MEKEMPLPMKTVNLVYNHPNSISCNKCSLILTTDQGAQTHLRTHRIPRSGYACGKCHHPFERISQVACHFPRCKNNPEETPSTATAIACELCSRHFETTRGLHLHQRSKHPLEYHQDLERKDVSKRRPYTSDEVNILAMEEARLHPQPRNINKHLAGLHLVDRTAEQIRVMRKSLRYKSTLASHQTREEKEEDEEKEEGEKENVEEEERGPREEEKKAMWDEELDKYLDDLTRSGNLSPGTRAVNRLLKNRAKDPNIIESLDGLLRDLYPEIFTRRSKSLRKKVEQEQREEQPKSSAARKRAEYTLQQQLWKRNRPLLAKVLLDDAPINPRGPPTSEIEEIYNERFGTPSPTDEEEYKRKENPEVGNLLLPITEQECSLMLRTLKRSAPGPDKITTAHLKLIGPKILCRIFNVWMRFGATPQWTKESRTTLIPKKNTDLHDVGNWRPITIGSHLLRVYTKLLSRRLQTSVVINHRQKAFRPVEGCAENIIILNNIIRDASTTRRRTDLAVAILDLAKAFDMVSHHSVVRALHRHGVPQPFINIIKDLYQGCTTTISLGGESTSRINITRGVKQGCPLSPLLFNIIIDELLDELPTSLGYNIKGARVNALAFADDLVLVGNSPEGTQHLLNKANLFFHSRGLRLQPKKCFSLGITHTRGKTSTHRVRITPFLTIEEHPVRTIRPGEWVRYLGINIGPQGTCKMQKEKITSDLQRLLRARLKPQQKIYMLRHHIIPRWSYSLAVTSQTINTINFIDREVRRCIRSILHSPPSLSNDFIHLPTKHGGLGISSIAEGCFIAKQRLRGRLVESLDPAVAVLAPTLHNKTLQHLRRRLQAEVGSGEEISTATILRARQLRLASKVQGYGSFHLTGKYCNNWLTGVSNILTGRNFVQACALRTQTLPTRESISRGRNNPESPPLCRNCGLQCETLSHILQNCHRTNKARLSRHNAVLQVLVKHLRARKWKIEEEPIVPTSSGRVIKPDLYAVSPQGEHYIWDAAIPYEGKQESLEIARIAKVRKYEAYRQNIANHFNIPASRISFDGIIVGARGATPSSLLSLGKQVGLTDKQLQLMSMRAMEGSLKIFRLFMAL

SEQ ID NO: 30061-31000 - skipped (940 entries)

SEQ ID NO: 31001 - DNA, 3801 bp, Acridotheres tristis
  source 1..3801: mol_type = genomic DNA
atggtccaattactggccttgcgatacgtatctatagccactcagacagaccccttagatctgtgggtccaaaaagccatcattccatctgttccccctgccatacacaaagatgaaggattcgatctgatgagtttggagttcatgaactcctcctatttggataaaggtggactccatctagatattggtcaggcgggattggctgattttcctgagccgtatgagaccttgcccattgggttaactcaggaactcaattctgagtgcagagtgagtgagattggagagcccaatacacccgttgctctccacagaaccaacaagggcggacctctactacaaacacccgttctatccatcaaagataaagacctggcttgccccagttgcgacatccgcttcaccacgatgtcaggaatagtcgaacatctactgataagtcatggacagaaaaagatcatcttccaatgtccaaaatgcggtaaacaagatctcaattgccacagcgtacaatgtcatttcccacgatgcaaagggaaggtgaatgtagttccaacaggtgactggacgtgtgaggtatgccaaaaaagttttaactctaagattggcctgggacaacacaagagactgatgcatccatccgtgagaaacaaggagagaattgaggcctcccatccaaaggaaacatcacagagaggagcccacaacaaggtgtggtcggagagcgaagtagcgctactgagacagctggtaacagagtacgctggatgcaagaacatgaatcagaaaattgcggagcgaataccaacaaaaacagctaaacaaataagcgataaaaagcgctatttggtacagaccacttccaagcacacacaaaaggtggaagataacaaggaagtgcatgaggtgaatgctaggacggaagtgcacaaggtgaattctgggacgaaagtgcaagaagaagtcccccagaaggtggaactcctgggggaaaataaattaaagctccattatcatgatgccatcagagagaagctggcggctcgcgaactacccaactgtcgaaaagccttcaagaaagtgttaaagggaaaagacccgcaaaaagcagtgaataagatctacaaggaagttctggataatccagtgagcaattgccatgataaaaaatcttcccgaaaagcaaaatcgaggaaaggccgaaaccacaatacatccgagtcaactaaatggatgcacaggagagctgtcaagagaggaaaatatctaagattccagaaaatgttccacctacagagggggagacttgcaagaatcatcttggatgatgtagaagctttgcaatgccagataccatctaacacagttcacgcagcgttcaaatccagatgggaaacaacagtagggttcaggagccttgattctttcccgcctcacgggaaagctgataacaccgcttttcaagccctgatcacccggaaggagattgagagaaacatcaaagaaatgagtaaaaggtcagctcctgggccagataagattaccttgggtcatctgctcaaaagagacccaaagttttctttgttgatggagatcttcaacctctggcttgtatctggaaccatccccgacacgctgaggggctgtcgaacagtcctgatcccaaaatccagcgacgccgccaagctcggtgacatcaacaactggaggcccatcaccatttcatctacggtgctgaggctattctccagaattataacagctaggctggccaaagcgtgtcccattaaccccaggcaaaaggggttcattagggcatcgggatgctcagaaaatcttaagctgttacaacttgtgcttaagcatgcaaaacgggagcattgtaacctcggagttgtgtttgtggacattgcaaaagctttcgatacggtctcccaccagcatatcatcacgggtcttgagcaaaggggagtcgatccccatattatccatctcattaaggacatgtacaagaacacaaccacgtacatcacgatgaaaaatgaacagaccgagagaatcaacatcctctccggtgtgaagcaaggcgaccctatgtcacctctgctgttcaacctggctcttgaccccctgctgtgtaagttggagaaggaaggcaaagggtttcaacgaggcaagttaaaagtcacagcaatggccttcgccgacgaccttgtactgctcagtgattcctgggacggtatgtgtgagaacatcaaaattctggagaccttttgcgatcttacgggactccagacacaggggaagaaatgtcatggattttacatcaggccaactaaggactcgtataccatcaatgactgtccgacttggctcataaagggctccccgctgaacatgatcgatccaggaagctctgaaaaatatcttggtgtacaggtcgatccctggactggctttgcagaccctggattatcacagaagttggaaggatggctccgtcgaattggggaagcaccactcaaacccctacaaaagatagatattcttcggtcttataccatcccaagactgatgtatctggccgaccacaccgagagcaaagctggacccttggagtcccttgactcgaatattcggaatgcagtcaaggattggttacatcttccaccgtgcacatgcgatgccatcctatattccagctgtagggatggtggactaggcatcatcaaattggcggcgttgattccgagtgtacaagcaagacggttacatcgcctggcccaaacatctgacagggccttaagagagtttttgaagggagaaaacctgcaagcactgtacgaaaagctatggattagagctggaggtgtgaaggaagccatgccgtcaatttgggagcgtagtacattgatgaccattgtcacgggaaatccagacttatcagaatgggaggtccctgctccaaaaatgcattacccaaaaccatctaattggaggaaaacagaatttaagaagtggaaaaagctggcatcacagggtcatggaattgaggtttttgaggaagataccatcagtaacaactggcttaagaattacagaggcgtacctcatcgtaagctgatcaccggtctgcaactaagggcgaatgtctaccccactcgagaattcctggccaggggtagggaaggaagttgtgcacgatcttgcagacactgtaacgcggaatacgagtcagctgcccacatcattggaacttgtccgatcactcaggatgccaggattaagcggcacaactccatctgtgacacccttagtgccgaagctaagaaatgtgggtggaccgtattccaggaaccacacataagggatgacaacaatgaattgtttaaacctgacttaatcttcgttaaggacagcaaggcattcgtgttggatgtgactgtacgctacgaacatgacaagcgttctctgaagagagcagctgaggaaaaggtaactaaatatcaacaccttctgccgcaagttcaagacctaaccaacgctgcagatgtcgagtttgtgggctttcccattggggcgcggggaaagtggtaccctaataactctgatgtgttacaggctctcggtctctctaaatcgaggctagggaaaactgaaagagccttggcactcagagccctctcctcctctgtagatattgttcacatgtttgcgagcaaagctcgctcagttgtacctgttttatccaataaagttgtcggcccctcccctcctgttggttgcgctggacagtga

SEQ ID NO: 31002 - DNA, 4029 bp, Acrocephalus scirpaceus
  source 1..4029: mol_type = genomic DNA
atgcctcctaatagtgacaatactattcccttaactatggaaaaacttcttccactttcgggaccaccagtacgcctatgtaggcgatcaatcagtactcagacttctatatcggacttttataaaacagatatagtgccaccagacataccacctaaaccccctgaccctgcagaaaacaaaattgattgcttggtaaacttggaattttatagatcggatttttctgctactaactgtgtttatttttctgttaactgggagggattgagtgggtttcctgaggtgtatgaacagcttgcaccacaaacaactgctggggagaagatctgccccacgagagacggtgaagtgcctgtgcttgaggaaggggagaggaatactgagggagaagaggagaggaaaactgagggagaaaaggagaaagcagaaacaccgccttctgacccagtgaccacggcatcaccagcacccccagcctcacctataaccagtaataaacagacacctgaagatatcactatggtgactgttccagacaaaaatccaccatgtcctcactgtggtattcgtatgaactgtgtatcggggttaattgaacatctttggggggttcacgggcggaagagggtttgttttcgatgtgctaaatgtgggaaagaaaacaataactgccatagtgttatttgtcacttttctaaatgcaggggaaaggtagaagaatcggctccggccggggagtggatctgtgaggtatgcggcagagatttcacaactaaaataggcttgggacaacacaaaagattggcacacccagctgttaggaatcaggaaagggtcgctgcttcccaccctaaaccaacctccaaccgaggagcccacaaaaaatgctggactgaagaggaagagaaactactgatagaattagaagctcaatttgagggacacaagaatattaataaactaattgcagaacatatcccaaccaaaacagccaaacaaattagtgataaaaggagactgcttcccaaaaaagatgtagtggacttaagtgatacagaaaagggaccatatcaacgcactaggagagctgctgctagaggaaaaacaatggaagagataagttcccaccctgataaggccaacggtcagcaggaaacccccagtaaggggaggggcccccggaccagaagaacagctgcgggagggagaacaaaggacaagataagcccccaccctgataaggacaacggcgagcagatgcctggcaaccagagggaggtgcaattacaagcccattatcaggaaaccatcggagcctggttatcagctgggaaaatcaagaccttctcaggggcattcaagcagttgctagggaaacaggagatacaagtaacggtaaaccaatctacacaggactgtttcagaaacctcgaaccaaagagtaaattaaaaacaattaaccaagagaaaacagataagggaccaacgagacctcctcagaagtggatgaagaaaagagctgttaaaagaggtaattatcttcgcttccaacgtctcttccatcttcacagggggaaactggccaagattattctggatgacgtagaatgtttaacatgtgatatcccacccagtgaaatctactcggtctttaaagccagatgggaaacacctggcaagtttgaaagccttgggaactttaagattactggaaaagctgataacagtgctttcagagacttgattacagcaaaagaaattgagaagaatattcaggaaatgagcaagggctcagctcccggtccagatgggattactctcggagacatcaggaagatggatcccaagtattcccggatcacggagatcttcaatttatggttaacatcaggaaagatcccggacatggtgaggggttgcaggactgttttaattcccaaatcaaccaaaccagagcgcctaaaggacattaacaactggagacccattacaatcggttccagcttgctcagactgttctccaggattttaacagctagaatgaccaaggcatgccccctcaacccaaggcaaaaaggcttcatacaagcagctggctgctctgaaaacctaaagctcctgcaaaccataatttggtcagccaaaagagaacacagacccctgggtgtggtattcgtggacattgctaaggcttttgacaccgtaagccaccagcacattctacatggtctgcagcaaagaggagtggatccccacatcgtcaacctggtgagaaatatgtatgaaaacatctacacacatatcaccaccaagagaacacagacggaccgcatccagatccgagtcggagtaaaacagggtgacccgatgtcaccctttttatttaatctggctatggaccccctgctgtgcgagttggaagagagaggcaaaggacaccatcgtggatcgagttgcattacggcgatggcattcgcggacgatctggtcttattgagtgattcctgggaggacatgaagaagaacatcaagatactagaggacttttgtgagctcaccggcctcaaaacacagggggagaaatgtcacggcttctacatcaagccgacaaaggactcttacacggtcaacgactgcgctgcttggattataaatggcactcccctgaaaatgatccaaccaggtgaatctgagaaatacctgggtctacaaatcgacccctggactggaatagcaaaatcaaacatctctacaaatctcgactcctggcttgaacgaattgatagggctccacttaaacctttacaaaaaattgacttactcaaaacatacaccatccctcgactgacatacctggcagaccattcagacctgaaagcaggcttcctagagactctagaccagaaaattcgcacaacagtcaaagaatggctgcacctaccctcatgcacctgcgatgccatcctgtactctagcaccaaggacggaggtttgggcatcaccaaattggcaaaactgatccctagtgtgcaagctcggagactacacagaatcgcccaatcatcagatgaaaccatgaaaatgtttttagatagggaccaaatggaactaatgcacaagaaactgtggatccaagctggaggggacaaggagaagatacctgaaatttgggaaactaaaccgacaatcgaaccacctacctcacatgatacagacacaacctctgagtgggaggcaccgaccctaaaaagcaaatttcccaagccatgcaattggagaaaggtagaatttagcaaatggacctcattagtgtctcagggccgtgggattgtaaatttcaaaggggaccaaattagtaaccattggataaaatactatagaagcatacctcacaggaagctcctaactgctttacagcttagggccaatgtctaccccactagggaattcctagccaggggtagacaggacaaatgcaccaaaacatgcagacactgcgaggcggacaacgagtcctgtgcccacatcatcggtaactgccccataactcaggatgcaagaatcaagagacacaactacatctgcggagtgctgtcggaagaggcgaggaagttggactggctagtgtttcaagaaccgcacataagggacaccaacaaggacctatacaaacctgacctgatatttgtgaaggacacccgggcactcgtcgtagatgtgactgtgcgatacgaatcggacaagacctcgttagagcacgcagcggcagagaaggtggacaaatacaaacatttgactaaagaggtacaaagactcaccaacgcaaaggacattacatttataggttttcccattggggcacgggggaagtggtaccataaaaactttgaactgctagaaactcttggactttccaaacatgatcaaatacagactgctcgatctttatcctgcacagctctcatgtcatctgtggacattgttcatatttttgctagcaaagctaggacatgcactatattgtaa

SEQ ID NO: 31003 - DNA, 4317 bp, Agelaius tricolor
  source 1..4317: mol_type = genomic DNA
atggcttattgcctgaaacctggccccccggtttcagacaggggcatggagttcggaaatggactgaccacccattccgttctcaccgtcgaatgtggtcccaattcgatggttattccggatccgtcctttggggggggggtctgggggccgccggtacgcctgtccagggtatcggtgggcactcagacttccccctccgactgggtagacctgttgtccaggggtttacccggcgccaggtctaactcccagcgggtagacctggtgtctttatttcccagacaccgggtagacctgttgtccaaaactcagcgggtagacctgttgtctgaaagtcagcgggtagacctgttgtccaaaagacagcgggtagacctgttgtctgacagtcagcgggtagacctgttgtccaaaactcaccgggtagacctgttgtctaaaactgaccgggtagacctggtgtcccaaattgacttaacatctaaaaccaccaatttggcagaaaatgaattggatttgctggtgaatttttctttagagctgtatagatcggacttgcatgtgcatgagggtgttcatttttctgtggattgggaagtgttgaacaggttgcccgaggtgtatgaagaacttgcaccacaaccgtgtgtgggggagaacttagactcgagccccccacaagacagcgaaccgcttgtgcttggtgagggaagcggcgggaaggcgggagaaggcacaccagaggcattgcccccagtgcctggggaaaacggagggcagtcaccggataacatcgtgaaggtgactgttcctgacaaaaatccaccttgtccttgctgtggtacccgggtaaactctgtggtaagcctgcttgaacatcttaaggggtcacacgggaaaaagagggttcgctttcggtgtgccaaatgtggaaaagaaaatgttaactatcatagtgttatttgtcattttccaaaatgcaagggtgcagaaattgaaaaggttccagctggagagtggatctgtgaggtatgcggcagagatttcacaaccaaaattggcctgggacaacacaaaagattggcgcacccgttgataagaaaccaagaaaggatcgttgcttcccaaccgaaagaaacatcaaaccgaggagcccacaaaaggtgctggacaaaagaagaggaagaactgctgataaaattggaggcgcagtttgagggaaacaaaaacatcaataaacttattgccgaacacataacgaccaaaacggcaaagcagattagcgataaaagaagattgctgcccaaaaaattgccagaggtaacggacaaggaacctggggtgtgtctccgcaccaggagagcggccgggagcgtgggaacggaacctgggacgagtcaacagtcccaggcgggaatattggacaatggacctgggaaatgccacctgccagggaggccggctgccggagagaaaacaatggagaagttgagacgacaccctgataaggataacggtcgccaaaagaccagcggccagcggagggaggggctgctgcaggctcattatcaaaagacgatcaaagaaggcttatcagctggagcaattaacaacttccccggagcattcaagcaattaatggacggccgggaaatgagaacaatgatcaatcaaacagcgcaggactgctttggatgcctggaatcgataagccagataagaactgctatgcgtgggaaaaattccgggaagaaggcaactatggagcaaccagcaagaaaattccagaagtggatgaaagatagggcgatcaaaaaaggtaatttccttcgcttccagcgtttatttcatctcgacagggggaaactagcgaaaattattttggatgacatcgaatgcttgtcctgtgatatatcacccagtgaaatttattcggtctttaaagccagatgggaaacacctggtaattttgccggccttggggactttaaaattactgggaaggcagacaacaatgccttcaaggacttaatcacggccaaagaaattgaacgaaatgtgcaggaaatgagcaagggctcagctccaggtccggatgggattactcttggggacatcgtaaagatggatcccgggtattcccggactgctgagctcttcaacttatggttaacatctggggagatcccggacatggtgagggggtgcagatctgttctgattccgaagtcgacaaaaccggaaagattaaaggacatcaataactggagacccatcacgatcggttccatcttgctgaggctgttctccaggattgtaacagcaaggctaagcaaagcgtgccccctcaacccaaggcaaagaggctttattagagcggcaggttgctctgaaaacctgaaactcctgcaaactataattcggactgccaaaagtgaacacaaaccactgggtgttgtattcgtggacattgctaaggcttttgacaccgtaagccaccaacacatcctacacgctttacagcagaggggagtggatccccacatcattggactggtgaacaatatgtacaaggacatcagtacgtatgttaccacaaaaagagacacacacacagacaaaatccagatccgggttggagtaaagcaaggtgacccgctgtcaccccttttatttaacctggcaatggaccccctgttgtgcaagctggaagagagcggtaaaggatttcatcgaggagagagcagtataacagcaatggcgttcgctgatgatttggtcttgctgagcgactcctgggaaaacatgcaaacaaacatcaagatattagagaccttttgcgatctcaccggtctcaaaacacaaggggaaaagtgccacggcttctacataaagcccacaaaggactcttacaccattaataactgcgctgcatggaccatcaatggcacacccctgaacatgattaatcccggagaatctgagaaatacctcggtctgcagtttgacccctggactgggctagcaaaaaccaacctcaccacaaaattagaattctggcttgaacgaattgatcaagctccacttaaacctctgcaaaaactcgacatcctcaaaacttacaccatccctcgactgacctacctggctgaccattcagaaattaaagcaggggctctggaagctctcgaccagaagatcagaacagcggtcaaggactggctgcacctacctccgtgcacctgcgatgccatcctgtactcgagcacgaaggacggcggtttgggcgtcaccaaattggcgggactgatccccagtgtacaggcccgaaggctgcaccggatagcgcagtcctcggatgagacaatgaaggagttcctggagaaagatcaaatggaacaattatatagaaaactgtgggttcaagctggaggggaaagagaagagataccctcaatttgggaggcactaccgacaagtgaacaatctaatagaggagacacaacctcggagtgggaagcaccgatcctgaaacctaaattccctaaaccttgtgattggaggaagaaagaattcgagaagtggaccaaattagtatcccaaggccgcggtattagtagctttaaaaatgactcgattagtaacgattggctccaatattatagacgcatacctcacaggaaactcatcactgcactacaactcagggctaacgtctaccccacgagagaatttctctcccggggtagagaggaaaattccaccaaggcctgtaggcactgcaacgtggaaaatgaaacttgcgcccacatcatcggccaatgcccagtgacgaaggacgccagaatcaagaggcacaatcacatctgtgacatgcttagtgaggaggcgaggaagaaggactgggtagtgttcaaagaaccgtacataagggataccaccaaggaactgtacaaaccagatctgatatttgtcaaagacggacatgccttcgtcgtggatgtgacagtacggtatgaaaccaccacaacatctctggaagaagccgctgcagagaaagtaaacaagtacaagcatttagaaaccgaggtgcgaaacctcaccaacgcaaaggacgttgtttttatgggttttccccttggagcgcgggggaaatggtacacagggaattttgaacttttgaatacgctcggcctctccaaatcgaggcaagtgagggttgcaaagactctatccacggtagcgctcctgtcatctgtggacattgtacatatgttcgccagtagggccagaagggtacaggattcagggtaa

SEQ ID NO: 31004 - DNA, 4014 bp, Ammodramus caudacutus
  source 1..4014: mol_type = genomic DNA
atggccccacggtctgacgggggcaccgggtcgggaagtgggctgaccacccaccccgcacctgagagtgaatctggtcatgactcaactgtcccaaatcctggtccagtccttgcagcgggggacggtgctcgaccggtacttttggtatcagtgggcacccaaacctgcaaagaggactttataacatctagaccaaccaaattgataggaaatgaatcagaattaggcttgctggtgaatttttcattagaggtgtatagatcagatctgaaaggggatgtgcaatttgagggggttcattttccagataattggggggtactggacgggtttcctgaggtgtatgaacaacttgcaccacaaacaggcgagggagacgggttaaaacctagtctccagggggacagtgagggagatgtacttgagaaaggtagcagcgagaaggggagggagaaggagaaggaaaaggaggaggagaaggagaaggaggttacaccagaggcattacccccaaagcggaaggcccacagcgaacagtcacaggataacatcgtaaaagtgactgttcctgacaaaaatccaccctgtccttgctgtggtgtccggttgaactcggttttggccctgattgaacatctcaagggccacgggaagaggagggtatgctttaggtgtgccaaatgtgggagggagaattttaaccatcatagtactgtttgtcatttcgcgaagtgtaaaggtccacagactgaaaggccaccagtgggagagtggatctgtgaggtatgcggaagggatttcacgaccaaaattggcctgggacaacacaaaagacatatgcatgcaatggagagaaatcaggaaaggatcgatgcttcccaaccgaaagaaacgtcaaaccgaggagcccacaagaggtgctggacgaaggaagaggaggaactactcatgaaattggaggtacagtttgaaagtcacaaaaacattaataaactcattgcggaacacttaacaactaaaacagctaaacaaattagtgataaaaggagaatgctgctcaagaaagggagggtgacagctggaaatttagattcggagcctgggatgaatcatcaacctcaggcagaagtcaaggacaatgaacttggggggtgtcatctgcccggggggccagctgttgataaagggacaatagggaaattaggacaacatcttgaatcgggtaacggtcaccaggaaactgctggccaaaagaaggagaggggactgcaggcccgttatagaaggagaattatgaagcgattagcggccgggacaattaacatcttccccaaagtatttaaagaactgctgaactgccaggaggcgagaccgctaatcaaccaaacaacagaggaatgctttggcctcctggactctgcatgccaaattagaacggcactccgggacaagggcagggcacaggaggagcgaccaaggaaacagtatcagaagtggatgaaagaaagagcgattaaaagaggtaactacctccgcttccagcgattattccatctagacagggggaaattggcaagaattattttggacaacactgagagcttgtcctgcgaaataccacccagtgaaatctattcggtattcaaggccagatgggaaacacctggacagtttaacggccttggggactttgaaattaaagggaaggccaacaataaagccttcagggacttaatcacggcaaaagaaattgaaaagaacgtgcgggaaatgagtaagggttcagcgccaggtccagatgggattgcccttggggacatcagaaagatggatcccgggtattcccggaccgccgaactcttcaacttgtggctgacatctggtgacatcccggacatggtgagggggtgcagaactgttttgatcccgaaatcgacaacaccggagcgcctgaaggacatcaataactggagacccatcacgattggttccatcttgctgaggctgttctccaggatcataacggcgaggatgactaaggcgtgccccctcaacccgagacagagaggcttcatcagtgcgccgggatgctctgagaacctgaaactcctgcaatctataattcggactgccaaaagtgaacacaggccactgggtgttattttcgtggacattgccaaggcttttgacaccgtaagccaccaacacatcatacatgttttacagcaacggagggttgacccccacattgtaggactggtgaacaatatgtacaacgacatcagtacacgtatcaccacgaagaaggacgcacatacagacaaaatccagatccgggttggagtgaagcagggtgatccactgtcaccccttctattcaacctggcaatggaccccctgctgtgcaagctggaagaaagtggcaaaggattccatcgaggacagagttcaataactgcgatggcattcgctgacgacctggttctgttgagcgactcctgggagaacatgaaagagaacatcagaatactggagaccttctgcgatctcaccggtctcaagacacaggggcagaagtgccacggcttctacatcaagcccacaaaagactcttacaccgtcaataactgccctgcgtggaccatcaatggcacacccctgaacatgatcaaccccggggagtcagagaagtacctcggcctgcagatcgacccatggactggaatagcaaagtacgatctctccacaaaactgaaagcctggctcgaaagcatcgaccgggctccactcaaacctctgcaaaaactcgacatcctcaaaacatacaccattcctcgactgacctacctggctgaccattcggagatgaaggcaggggctttggaagcacttgaccaacagattcggacggcggtcaaggactggctgcacttaccctcgtgcacctgtgatgccatcttgtacgtaagcacgagggacggcgggttgggtgtcactaaattggcgggtctcattcccagtatacaagcccggaggctgcaccgcattgcgcagtcaccggaccagacgatgaaggacttcttagagaaggcccagatggagaaaatgtatgagaagttatggattcaagctggaggtaaaaagaaggggatgccgtcaatttgggaagccccgccggcgaccgtaccacctgtcaatgcaggcacactttcggagtgggaagcaccgaaccctaaaagtaggtacccaaaaccttgtgattggaggagaaaagaacttaaaaagtggacgaaattagagtcccaaggtcgtggagttaaaaattttaggaacgatagtattagtaacgattggattcaatgttatagacgcatacctcacaggaagctcctcactgctatacaactcagggccaatgtgtatcccacgagggaattcctcgggcgggggaggggagatgactgtgttaagttttgcagacactgcgagatggaccttgaatcctgtggccacatcatcggcttttgcccagtaacgaaggacgcccggatcaagaggcacaatcgcatttgcgacaggctctgtgacgaggcgatcaagagagactgggtggtgttcaaggaaccgcacttgaaggatgccaccagggaactgttcaaaccggacctgatatttgtgaaggagggccgtgcactggttgtggatgtgacagtacggtacgaagcagcaaagacaacgctggaggcagctgctgcggagaaagttgacaagtacaaacatttggagcccgaagtgaagagcctcaccaacgctacggacgttgtttttatggggttcccccttggagcgcgggggaagttttacaaagggaactttgatttgcttgagactcttggcctcccaaaaacgaggcagataagtgtggcaaagactctgtccacgtacgcgctcacgtcatctgtggacattgtgcacatgtttgttagtaaggctagaaaatctaatgtctag

SEQ ID NO: 31005 - DNA, 4014 bp, Ammospiza nelsoni
  source 1..4014: mol_type = genomic DNA
atggccccacggtctgacgggggcaccgggtcgggaagtgggctgaccacccaccccgcacctgagagtgaatctggtcatgactcaactgtcccaaatcctggtccagtccttgcagcgggggacggtgctcgaccggtacttttggtatcagtgggcacccaaacctgcaaagaggactttataacatctagaccaaccaaattgataggaaatgaatcagaattaggcttgctggtgaatttttcattagaggtgtatagatcagatctgaaaggggatgtgcaatttgagggggttcattttccagataattggggggtactggacgggtttcctgaggtgtatgaacaacttgcaccacaaacaggagagggagacgggttaaaacctagtctccagggggacagtgagggagatgtacttgagaaaggtagcagcgagaaggggaaggagaaggagaaggaaaaggagggggagaaggagaaggaggttacaccagaggcattacccccaaagcggaaggcccacagcgagcagtcacaggataacatcgtaaaagtgactgttcctgacaaaaatccaccctgtccttgctgtggtgtccggttgaactcggttttggccctgattgaacatctcaagggccacgggaagaggagggtatgctttaggtgtgccaaatgtgggagggagaattttaaccatcatagtactgtttgtcatttcgcgaagtgtaaaggtccacagactgaaaggccaccagtgggagagtggatctgtgaggtatgcggaagggatttcacgaccaaaattggcctgggacaacacaaaagacatatgcatgcaatggagagaaatcaggaaaggatcgatgcttcccaaccgaaagaaacgtcaaaccgaggagcccacaagaggtgctggacgaaggaagaggaggaactactcatgaaattggaggtacagtttgaaagtcacaaaaacattaataaactcattgcggaacacttaacaactaaaacagctaaacaaattagtgataaaaggagaatgctgctcaagaaagggagggtgacagctggaaatttagattcggagcctgggatgaatcatcaacctcaggcagaagtcaaggacaatgaacttggggggtgtcatctgcccggggggccagctgttgataaagggacaatagggaaattaggacaacatcttgaatcgggtaacggtcaccaggaaactgctggtcaaaagaaggagaggggactgcaggcccgttatagaaggagaattatgaagcgattagcggccgggacaattaacatcttccccaaagtatttaaagaactgctgaactgccaggaggcgagaccgctaatcaaccaaacaacagaggaatgctttggcctcctggactctgcatgccaaattagaacggcactccgggacaagggcagggcacaggaggagcgaccaaggaaacagtatcagaagtggatgaaagaaagagcgattaaaagaggtaactacctccgcttccagcgattattccatctagacagggggaaattggcaagaattattttggacaacactgagagcttgtcctgcgaaataccacccagtgaaatctattcggtattcaaggccagatgggaaacacctggacagtttaacggccttggggactttgaaattaaagggaaggccaacaataaagccttcagggacttaatcacggcaaaagaaattgaaaagaacgtgcgggaaatgagtaagggttcagcgccaggtccagatgggattgcccttggggacatcagaaagatggatcccgggtattcccggaccgccgaactcttcaacttgtggctgacatctggtgacatcccggacatggtgagggggtgcagaactgttttgatcccgaaatcgacaacaccggagcgcctgaaggacatcaataactggagacccatcacgattggttccatcttgctgaggctgttctccaggatcataacggcgaggatgactaaggcgtgccccctcaacccgagacagagaggcttcatcagtgcgccgggatgctctgagaacctgaaactcctgcaatctataattcggactgccaaaagtgaacacaggccactgggtgttattttcgtggacattgccaaggcttttgacaccgtaagccaccaacacatcatacatgttttacagcaacggagggttgacccccacattgtaggactggtgaacaatatgtacaacgacatcagtacacgtatcaccacgaagaaggacacacacacagacaaaatccagatccgggttggagtgaagcagggtgatccactgtcaccccttctattcaacctggcaatggaccccctgctgtgcaagctggaagaaagtggcaaaggattccatcgaggacagagttcaataaccgcgatggcattcgctgacgacctggttctgttgagcgactcctgggagaacatgaaagagaacatcagaatactggagaccttctgcgatctcaccggtctcaagacacaggggcagaaatgccacggcttctacatcaagcccacaaaagactcttacaccgtcaataactgccctgcgtggaccatcaatggcacacccctgaacatgatcaaccccggggagtcagagaagtacctcggcctgcagatcgacccatggactggaatagcaaagtacgatctctccacaaaactgaaagcctggctcgaaagcatcgatcgggctccactcaaacctctgcaaaaactcgacatcctcaaaacatacactattcctcgactgacctacctggctgaccattcggagatgaaggcaggggctttggaagcacttgaccaacagattcggacggcggtcaaggactggctgcacttaccctcgtgcacctgtgatgccatcttgtacgtaagcacgagggacggcgggttgggtgtcactaaattggcgggtctcattcccagtgtacaagcccggaggctgcaccgcattgcgcagtcaccggaccagacgatgaaggacttcttagagaaggcccagatggagaaaatgtatgagaagttatggattcaagctggaggtaaaaagaaggggatgccgtcaatttgggaagccccgccggcgactgtaccacctgtcaatgcaggcacactttcggagtgggaagcaccgaaccctaaaagtaggtacccaaaaccttgtgattggaggagaaaagaacttaaaaagtggacgaaattagagtcccaaggtcgtggagttaaaaattttaggaacgatactattagtaacgattggattcaatgttatagacgcatacctcacaggaagctcctcactgctatacaactcagggccaatgtgtatcccacgagggaattcctcgggcgggggaggggagatgactgtgttaagttttgcagacactgcgagatggaccttgaatcctgtggccacatcatcggcttttgcccagtaacgaaggacgcccggatcaagaggcacaatcgcatctgcgacaggctctgtgacgaggcgatcaagagagactgggtggtgttcaaggaaccgcacttgaaggatgccaccagggaactgttcaaaccggacctgatatttgtgaaggagggccgagcactggttgtggatgtgacagtacggtacgaagcagcaaagacaacgctggaggcagctgctgcggagaaagttgacaagtacaaacatttggagcccgaagtgaagagcctcaccaacgctacggacgttgtttttatggggttcccccttggagcgcgggggaagttttacaaagggaactttgatttgcttgagactcttggcctcccaaaaacgaggcagataagtgtggcaaagactctgtccacgtacgcgctcacgtcatctgtggacattgtgcacatgtttgttagtaaggctagaaaatctaatgtctag

SEQ ID NO: 31006 - DNA, 3075 bp, Buteo platypterus
  source 1..3075: mol_type = genomic DNA
atgcatatatttttcagtcctggtccccctggactttcggactccagtgacagagatgggaacgccaatagtaccggcacccagagcgaagcaaacaaccccagcttcccatgcttctgtggggcacaatttaaaaccaagaggggcctcggcaagcaccaatcctatcgccatccggcacaggtgaacgccgaacgagtaaaagccctgcccacgaagcgcctaacatggagccatgaggacgatgaggccctgcgacggctagctaacaatatctggaaggatgggatgatgaagaaggtgcttatcaccaacctcacaccctacttccccggccgttcgcatgaagcgattaagaaacgcctccaagtgattacatggtctccagaaagagcggaacaccccactgtgcgtgaaaccccagacacaaacccggttgagcgtgataccccaggaaccacagatccggttacccatggaccggaccccagtgcctcatggagagatgccctcctgagagctgcggcagaacatctcacagaaagcaacatgggggcggaggagctgacccagattgcccgagacttgcagaacggagtgagtcgcaagcgaattagaacgcgactgaatcagcacgcggaaaagtacttcccgcacaagtggaagccgtcggtcatccgaccaaagaaaactattgctagcagcaaaaaagccatccgtagagcgaactatgccaccgttcaaaagctctacaagctgcggcaacgcgatgctgcctccactgtactgtccggacgctggagaagcgcgtacaaagggccagcgccgatcccacaagggatggaagaatactggcggtcagtattcgaaacaccgagcgcagcggataatagcgtacctgtagtcccttctacagtcctgtggtcactcatggaaccgattgccccgtcggaggttacagcagcactccacggtatgaaagccagtgctccgggactggacagaatatcggcggaggagctactaacctgggaccagccttcactagcagcatactacaatgtgttgttagctgtgggtggcccgccgaagcacatctcttgttcaagagtagtgtttcttcccaagacggaggacccttcggccccaggtgactacaggcctatttccattgcctcaaccatcctgcgtgcaatgcataagatcctcgcctggcgcctacgagatacgcttcagctctctcccctccagcatgctttcctccaaagagatggctgcctcgaggcttcgaccttgctgcatactatcttccgcggggtccacacagatagagttccatgtgcgatgctgtttttagacgttgccaaagcgtttgatacggtgtcacatatgagtctcttccgtgtggcccgcgaggcaggtctacctcgtccgatggtgtcatacctacgacacctataccaggaatccacaatccagcttgcagaggccaccacccagtgtggccggggtgttcgacaaggcgacccattatccccactcctgtttataatggtcatggatgacatcataaaatcgtcgctccctgacatcgggttcgacttaaatggccagaaaatcggcagtctagcgtatgcggatgacctcgtgctcttagctggcaatcccagcaggcttcaggagaaactaaatctactctctgaaggcctccagcgagccggtatggcactcaacgctaagaaatcccacggcatcaccatcgccagggatggaaagcgcaagtgcatggccctagtcccagaagcatataagtgtaagggggataacatccaacccctagggactgatgactcagttaaatacctgggcctccagtttaactggaaagggcgaataacacccaaacataccggcaagctggcaaccatgctaaatgagctgaccaaggcaccccttaagccgcaccagcgacttaagcttttaaaaatccatctggtgcccaaattaacacacgaattggtcttaggtcatgcccatcgaaacaccctgaaaaagctagactgcctaacacgtgctgcggtgcggcgatggcttcggcttccaccagacacaccggtgggatacttccacgcgaatgtcaaagacggtggcttggggatgccgtgtttctccacttctatcccactcctgcaacaaaagaggctcgagaagatagccctgagccctgcatccctgttccaggaggtgcagagacaggactccttccgaaccttagggcgccgcattgaaaggccatgcagactgaatggcctggaggtggcaaccaaggcagaagtgagagaagggtggaggatcgcgctctccagctccgtggatggcagagagctgagtatcccgaaggtagataaagccagccacgagtggctacgcaatcctgctcgggtgttccctcgactctacatcaggggcatccagctgcgatgtgggctactccccaccaaagccaggagtgcgcggggaaacaacaggcaagttaccgacagaacttgcaggggagcctgtcgtgccccagaaaccctaaaccatgtgctgcaagtgtgcgaggtgacgcacgatgccaggtgcgcacgccacaaccgagtgctgcggtccctcgagaagctgctgagccgtgcgggtatccagacgagagtggagccgatcatcccatcgggcgcctccttcatcaagccggacctgatcgcagagatggagaaccagctgtgggtcctcgacgtctccgtggtcgccggctaccgattggaggaatcctgggagatcaagtctgctaagtatggacgtcccgaccgagtcgcagatattcgacgctgggctgcagtaccggacaccacccccgttttccagttaccggtcatcatttccaacagagggctgttctacgaaccatcgggcaagaaacttcgggctttgggtttgagctgccgggacattatggacctatgtgttttggccattggcggctcgctcaagtgctacgattggtacactcgtggaacaaaagactggaaatgttga

SEQ ID NO: 31007 - DNA, 4254 bp, Chamaetylas choloensis
  source 1..4254: mol_type = genomic DNA
atggagccgttgggaatcgccagttcaacggtctcctgccaaaaattcggtgaaacaaattcctcggtaaaaagccgcgtggcttcattgcccgaaacctggccccccggtttcaaaggggcaatgtctccggtaagtggactgaccacccactaccgttccaccttccaaggtgggcccattccgatgggttctggctctgatttgggggggggggtctggtttagagcgccggcacgcctgtccagggtgtcggtgggctcccagacctcccccagcgactgggtagacctgttgtcctggaattttaattttttaccaggctccaagtctaattcccagcgggttgacctgttgtctaggcactgggttgacctgttgtccaaaaatgaccaggtagacctggtggctcaaaatttaccatccaaattgtcccccgattcggcagaaaatgaattggctttgctggtgaacttagagttttacaggtcggatttgcatgagcatgagggtgttcatttttctgctaattgggagggtttgagcgggttgcctgaggtgtatgaacagctagcaccacaaccgtgtgcgggagatagttcacattctagtctcccgcgggacactaaactgtttgtgcttgagcaaaagggcagcgtggagaaggagagcgaggacgtgccaaaaacatcccctccgacgcctgggaagcccggggagcggacacctgaggagacggtgacggtgactgttcccgacaaaaatccaccttgtccttgctgtggtacccggctgaactctgtgttgggcctaattgaacatctaaaggggtcgcacgggaaaaagagggtttgttttcggtgtgttaaatgtggaaaggaaggtactaactatcacagtattgtttgtcactttcccaaatgcaggggtgcagagactgaagcggctccagctggggagtggatctgtgaggtatgcggacgagattttcaaactaaaattggcctgggacaacataaaagacatgcacacccgttgataagaaaccaagagaggatcgctgcttcccacccgaaagaaacatctaaccgaggagctcacaaaagatgctggacaaaggaggaggaggagatgctgataaagttagaggcgcagttcgagggccacaaaaacatcaataaactcatcgcggaacacatcacaagcaaaacagctaagcagataagcgacaaaaggagattgctgcccaggaaaccagataaggaccttgaagaggaacctgctgtgagtactcgcaccaggagagcagctgcgggcctgagaaaggaacctggggtgagtcatcaaagccaggctacgatcgaggacaatggacctgggcggagccaccggccagggaagccagctgccggaaagaaaacaatggacgagataagccaccgccctgataagggtaacggccggaggggaaccatcaagcagcagatggctgggcaactgcaggcccattatcaccggacactcggggaaaggctatcagctggggcaattaacaccttcccccgggcattcaagcagttaatggaaggccaggagatgcaagaaaccatcaaccaatcagcgcaggactgcttcggatgcctggaatcgataagccagataagaacagcaacccgagataagatcaacaaagggacccgggagaagcaaccaaagagaccttttcaaaagtggatgaaggacagagcaattaggaagggtgattaccttcgcttccagcgattattccatcttgacagggggaaacttgcaaaaattattttggacgatgttgagactttgtcctgtgatattccacccagtgaaatttattcggtttttaaagatagatgggaaacacctggtaactttaatagccttggggaattccaaagtaatgggaaagccgacaatagcgctttcagagacttaattacggccaaagaaattgagaaaaatgtgcaggaaatgagcaagggctcagctcccggtccagatgggattactcttggggacgtcaaaaagatggatcccgagtattcccggacagcggagatcttcaatctgtggttaacatctggaaaaatcccggacatggtgaggggatgcaggactgttttaattccaaaatcaacagaaccggaacgtttgaaggaccctaacaactggagacccatcacaattggttccatcttgctgagacttttctccaggattgtaacagctaggctgagcaaggcctgccccctcaacccaaggcaaagaggcttcatcagagcggcgggatgctctgaaaacttgaaactcctgcaatctgtaatgcggtctgccaaaaaagaacacagaccactgggtgttgtattcgtggacattgccaaggcttttgacaccataagccaccaacacatcatacacgctttgcagcaaagagaggtggatccccacatcatcggcctggtgagcaatatgtacaaggacaccagtacttatatcaccgtaaagaaaaacacacacacagatgaaatccatttccgggttggagtaaaacagggtgacccgatgtcaccccttttatttaatctggctatggaccccctgttgtgcaagctggaagagagcggcaaagggtaccatcgaggccggagcagcatcacggcgatggcattcgcggacgatctggtcttattgagtgactcctgggaaaatatggaaacaaacatcaagatattagagaccttctgcaatctgaccggtctcaaaacacagggagtgaaatgccacggctactacatcaagccgactaaggactcttacaccgtcaatgactgcgctgcttggaccatcaacggcacacccctgaacatgattgaccccggtgaaactgagaaatacctaggcctgcagattgacccctggactgggatagcaaaatccaatctctccactaaacttgaatattggctccaacgaattgatcaagctccacttaaacctctgcagaaagttgatatcctcaaaacatacaccatccctcgaatgacgtacctggccgaccattcagacctgaaagccgggttcctcgagagccttgaccaaaagatccgaacgacggtcaaggactggctgcacttaccttcttgcacgtgcgatgccatcctgtactcgagcacgaaggacggcggtttgggcatcaccaaattggcagggctgatccccagcgtgcaggcccgaaggctgcatcgtatcgctcaatcttcggatgaaacgatgaagatgttcctggagaaagatcaaatggaacaaatgcataagaaactgtggattcaagctggaggggacagggagaagattccttccatctgggatgcaccgccggtgagcgaaccatctaacagtgcaagcacaatttcggagtgggaagcaccatccttgaaaactaaatttccaaaaccgtgtaattggaggaaaaatgaatttaaaaattggactaaattagtgtcccaaggccgtggaattataaattttgaaggtgataaaattagcaaccattggctacagtattacagaagcatacctcacaggaagctcctcactgctttacaactcagagccaacgtataccccacaagagagttcttagctagggggaggcaagataaatacatcaaggcatgcaggcactgcgatgcggacattgaaagctgcgcccacatcatcggcaactgcccagtgacgcaggacgcccgtatcaagaggcacaattacatctgcgaagtgcttcttgaggaggcgaaaaagaagggctgggtagtgttccaagaaccgcacataagggataccaccaaggaactgtacaagcctgatctgatatttgtaaaagacgcccgtgcacttgtggtggatgtgacagtacgatacgaagcagccaaaacatcgctagaggacgccgctgcggagaaagtgaacaagtacaagcatttagagactgaggtacgtaacctcaccaacgcaaaggacgttgcttttatgggctttccccttggagcgcgggggaaatggcaccagaaaaactttgaacttctggaagctctgggcctctctaagtcgaggcaagagaaaattgcaaggactttatccacaacagcgctcctgtcatctgtggacattgtacgtatgtttgctagtagggccaggaaattaggtaaccaggagtag

SEQ ID NO: 31008 - DNA, 3693 bp, Chamaetylas fuelleborni
  source 1..3693: mol_type = genomic DNA
atgatacaaccgctctcgttgcggtacatatcaacggccactcagacggaccctttagacctacgggtcccagaggccgagattccatcaataccccccacatcaagtactgaggggttcgagctggtatgtctagagtttgtgaactcctcctatagcgaggagattggattccatctggaaactatttgggagggcttggccagtctacctgaaccctatgagaccttgcccttgcggttggttcagagagatgaatctgagtgtgttgaaacggtggttgaagagcttaaaacacctgaggctcttccagggcccagcggtgataggacaccggttggaacacctgtggtgtccgtcccggacaaaaatccagcatgtccacgttgtgccacccgttttacccggatgctggggttgattgaccatctaaagagaaatcacgggcagaaaaagatctggttcaagtgttcgaagtgtggtaaacaaaatcttaaataccacagtattgcttgtcacttcccacggtgcaagggggaagtatgtgtggttccaactggtgattgggtctgtgaggtatgccagagaagttttaccaccaagataggcctgggccaacacaagaggctgatgcatcctcttgtgagaaatttggaacggattgaggcctcccatccaaaggtgtcatctttacgaggggcccacaagaaggtgtggacggaggaggaggaggccctcctgagtcaactggtggtggcatatgctggtaggaagaacatcaaccaactaattatggagcacataccatctaagactgcgaagcagatcagtgataaaagacgccttctgatgaaagctccctccaagagagatcgatctgaggaggaaggtgcggggaaagaagaacttccccagggtgctgacctgccacaggaggggcagttgaagctccaatactcggatgccatcaagagaaagttggcggcatgtgagttcactagctgccaggaggccttcgcgaaaattcgagatgggcaagatccgcagacggtggtgaatgaggtttatgagaagttttttggtagcccgcgtgggctcagccagaatgtaaaatcttccaggggccggaagtcacagaagggccagaaagcatccgggaaaacaactaattggatgcgaaaaagggcaaagaaaaaaggaaaatatctccgatatcagaggctgtttcatttgcacagagggagacttgcacgaattatattggataacatcgaggctatacagtgccagataccatctaacattgtccacgccgcttttaaagctcgatgggaaacatctgttggttttaagggtcttgaatccttcccaccacatgggaaggctgataacaccgcttttcaagccctgattacagaaaaagaggttgaaaagaacttgaaggaaatggcaaagacctccgctcctgggccagatgggattactttgggtcagcttcttataaaagacccgaagttttctctgttgacggagatcttcaacctctggctggttactggaacgatacctgatttgctccgggactgccggacagtcttgattccgaaatccaccgatttggaaaaggtgggtgacatcaacaactggaggcctatcaccattgcctcgacggtgcttaggttgttttccaggattgtgacggcgagactgacccgagcttgtcccattaaccccaggcagaggggatttattcgggcgtcaggatgttccgagaatttgaagctattgcagcttgtggtgagacatgctaaaagggagcattgtgacctgggggtcgtatttgtggacattgctaaggcttttgataccatcagccatgaacatattattatgggtctgatgcagaggggggttgatccccatgtgatccaactagttattgacttgtacaagaacatcagtacgtatattgacttgaaatctgggaaaacagacccgattaagatcttaagaggggtcaaacaaggagacccgatgtcacctattttatttaatcttgcgcttgatcctcttttgtgtaaattggagaaggatggctatggtttccagcgaggacgtttaaaacttacagctatggcctttgctgatgacttggtattgttaagtgactcctgggatggaatgtgcagtaacatcaagatcctggagaccttttgtgaacttactggtctccagacgaagggggaaaaatgtcacggcttttacatcaagccaactaaggacgcgtataccatcaatgattgtccagcttggattgttaatggttccccccttaatatgattgacccagggaattcagagaaatatcttggtgtacagattgacccctggactggctttgccgactcaggtttatcgaagaagctggaagaatggctccagcggattggggatgcaccactgaaaccccttcaaaaagtcgatatacttaggacgtataccatccctagactaatatatctggctgaccacaccgaagttaaaagtgggcccctcgaatcccttgacttgattgttcggaatgaagtcaaggtatggcttcacctccccccgagtacgtgtgatgcgatcttgtattcgagatgtaaagatggtggtctaggtgttatcaagttatcggcgcttgttcctagtatacaagcgcgaaggctgcacagattggctcaatcttcggatgagactctggttgaatttttaaagggggaacatctggaacttttatatgagaagctatgggtacgagctggtggtgagaaggagtctatcccgacaatttgggagcctattccagtggatgaaagtgtcgggagtggaggtgaaggtttgtcggattgggaggcacccgttcccaaagtccgctacccgagaccttgcaattggcggaaagtagaatttaatagatggaaacgcctggcagcccagggccatggtattgagaattttgagaatgataacatcagtaatggctggttaatccagtacagaggtattcctcatagaaagttgattacagcattgcaattgagagctaacgtctaccccacaagagagttcctggccaggggtagaggggatgtctatgcgagatcttgtagacactgtggtgccgattatgaaacaacagctcacataatcgggagctgcccaatcactaaagaggccaggattaagcgtcataattccatctgtgagactcttagcaacgaggctaagagggagggttggtcggtattccaggaaccacatatacgggacgagaagcaagaattgtttaaaccggacttgatatttataaagggaaataaggcacttgtggttgatgtgacggtgaggtacgagcataacaactcctctttaaaggaggcggctgcagaaaaggctaagaaatatcagtgcctggtacatcaaattaaggatttaactaacgcagctgaaattgaatttgtgggctttcccattggggcgcgggggaagtggtatgagaagaactctgaattgttaacggccctcggtctctctaaaacgaggctagggaaaactgcccgggccctagcatccagagcgctccttacttccgttgatattgtacatatatttgccagcaaagcacggactgttgtatccaataaataa

SEQ ID NO: 31009 - DNA, 4254 bp, Cichladusa arquata
  source 1..4254: mol_type = genomic DNA
atggagccgttgggaatcgccagttcaacggactcctgccaaaaacccggcgaaacaaatttctcggtaaaaagccgcgtggcttcattgcccgaaacctggccccccggtttcataggggcaatgtctccggtaagtggactgaccacccactaccgttccaccttccatggtgggcccattccgatgggttctggctctgatttgggggggggggtctggtttagagcgccggtacgcctgtccagggtatcggtgggctcccagacctcccccagcgactgggttgacctgttgtcctggaattttaattttttaccaggctccaagtctaatgcccagtgggtcgacctggtgtctaggcacggggttgacctgttatccaaaaatgaccaggtagacctggcaactcaaaatttaccatccaaattgtcccccgatttggcagaaaatgaattggctttgctggcgaacttagagttttacaggtcggatttgcatgtgcatgagggtgttcatttttctgctaattgggagggtttgagcgggttgcctgaggtgtatgaacaactagcaccacaaccgtgtgtgggagatagttcacgtgctagtctcccgcgagacactaaactgtttgtgcctgagcaaaggagcagcgaggagaaggagagcgaggacgcgccaaaaacattccctccaacgcctgagaagcccggggagcggacacctgaggagactgtgacggtgactgttcctgacaaaaatccaccttgtccttgctgtggtaccagggtaaactctgtattgggcctaattgaacacctaaaggggtcgcacgggaaaaagagggtttgttttcggtgtgttaaatgtggaaaggaaggtactaactatcatagtattgtttgtcactttcccaaatgcaggggtgcagagaccgaagcggctccagctggggagtggatctgtgaggtatgcggaagagattttcaaactaaaattggcctgggacaacataaaagacatgcacacccgtcaataagaaaccaagaaaggatcgctgcttcccacccgaaagaaacatctaaccgaggggctcacaaaagatgctggacaaaggaggaggaggagatgctgataaagttagagatgcagttcgagggccacaaaaacatcaataaactcatcgcggagcacatcacaaccaaaacagctaagcagataagcgacaaaaggagattgctgcccaggaaaccagataaggacattgaagaggaacctgctgtgagtactcgcaccaggagagcagctgcgggcctgagaaaggaacctggggtgagtcatcaaagccaggctgcggtcgagaacaatggacctgggcggagccaactgccagggaagccagctgccggaaagaaaacaatggacgagataagccaccgccctgataagggtaacggccggaggggaaccatcaagcagcagatggctgggcaactgcaggcccattatcaccggacactcggggagaggctatcagctggggcaattaacaccttcccccgggcattcaagcagttaatggaaggccaggagatgcaagaaacgatcaaccaatcagcgcaggactgcttcggatgcctggaatcggtaagccagataagaacagcaacccgagataagatcaacaaagggacccgggagaaacaaccaaagagaccttttcaaaagtggatgaaggacagagcaattaagaagggtgattaccttcgcttccagcgattattccatcttgacagggggaaacttgcaaaaattattttggacaatattgagactttgtcctgtgatattccacccagtgaaatttattcggtttttaaagacagatgggaaacacctggtaattttaagagccttggggacttccaaattaatgggaaagccgacaatagcgctttcagagacttaattacggccaaagaaattgagaaaaatgtgcaggaaatgagcaagggctcagctccaggtccagatgggattactcttggggacatcaaaaagatggatcccgagtattcccggacagcggagatcttcaacctgtggttaacatctggaaaaatcccggacatgctgaggggatgcaggactgttttaattccaaaatcaacagaacctgaacgtttgaaggaccctaacaactggagacccatcacaattggctccatcttgctgagacttttctccaggattataacagcgaggctgagcaaggcctgccccctcaacccaaggcaaagaggcttcatcagagcggcgggatgctctgaaaacttgaaactcctgcaatctgtaatgcggtctgccaaaaaagaacacagaccactgggtgttgtattcgtggacatagccaaggcttttgacaccataagccaccagcacatcatacacgctttgcagcaaagagaggtggatccccacatcattggcctggtgagcaatatgtacaaagacaccagtacctatatcaccgtgaagaaaaacacacacacagatagaatccatttccgggttggagtaaaacagggtgacccgatgtcaccccttttatttaatctggctatggaccccctgttgttcaagctggaagagagcggcaaagggtaccatcaaggccggagcagtatcacggcgatggcatttgcggacgatctggtcttgctgagtgactcctgggaaaatatgaaaacaaacatcaagatattagagaccttttgcaatctgaccggtctcaaaacacagggagtgaagtgccacggctactacatcaagccgacaaaggactcttacaccgtcaatgactgcgctgcttggaccatcaacggcacacccctgaacatgattgaccccggtgaaactgagaaatacctaggcctgcagattgacccctggactgggatagcaaaatccaatctctccactaaactagaatattggctccaacgaattgatcaagctccactgaaacctctacagaaagttgatatcctcaaaacatacaccatccctcgaatgacatacctggccgaccattcagagctgaaagccgggttcctcgaaagcctcgaccaaaagatccgaacgacggtcaaggactggctgcacttaccttcgtgcacgtgcgatgccatcctgtactcgagcacgaaggacggaggcttgggcatcaccaaattggcaggactgatccccagcgtgcaggcccgaaggctgcatcgtattgctcaatcttcggatgaaacgatgaagatgttcctggaaaaagatcaaatggaacaaatgcataagaaattgtggattcaagctggaggggacagggagaagattccttcaatctgggatgcaccgccggtgagcgaaccatctaacagtgcaagcacaatttcggagtgggaagcaccgtccttgaaaactaaatttccaaaaccgtgcaattggaggaaaaatgaatttaaaaattggactaaattagtgtcccaaggccgtggaattataaattttgaaggcgataaaattagcaaccattggctacaatattacagaagcatacctcacaggaagctcctcactgctttacaactcagagccaacgtataccccacgagagagttcttagctagggggaggcaagataagtacatcaaggcatgtaggcactgcgatgcggacattgaaagctgcgcccacatcattggcaactgcccagtgacccaggacgcccggatcaagaggcacaattacatctgcaaagtgcttcttgaggaggcgaaaaagaagggctgggtagtgttccaagagccgcacataagggataccaccaaggaactgtacaaacctgatctgatatttgtgaaagatgcccgtgcacttgtggtggatgtgacagtacggtacgagtcagccaaaacatcgctagaggatgccgctgcagagaaggtgaacaagtacaaacatttagagacggaggtacgaaacctcaccaacgcaaaggacgttgtttttatgggctttccacttggagcgcgggggaaatggcaccagaaaaactttgaacttttgggagctctgggcctctctaagtcgaggcaagagaaaattgcaagaactttatccacaacagcgctcatgtcatctgtggacattgtacatatgtttgccagtagggccagaaaattatgtaaccaggagtag

SEQ ID NO: 31010 - DNA, 3774 bp, Ciconia episcopus
  source 1..3774: mol_type = genomic DNA
atgggtcgtccgatacggattgcgttcgtatcggtggccacacaaacaggtccgatagacctgcgcgaaagagtaatcacagagactgggaaagagcacgataaaagtaacgtgccggaggacagctggaattgtacagggctggagtttattaactcaattgttgaaggactggaatggagtcatccttccaaccgggctgagagactggccaagtttcctgaagtttacgagacgtataacagctcacacgcggctgagacggagatcaatgagaagggggaaccatcacctcgaaaggccatgtcaccgccacggactcctagtccggatcacaatactgacctgccaaacgaaggcacaccggtggtaaaggtcccggacaagaatacatcatgtccgtgctgtggaaaccggataggaaaaatctcgcagctggttgaacatctaaagagagcccatggaaacaaaaagatcttgtttcagtgtgccaaatgtggaaaaacagaaatgaaacatcacagtattgcgtgccattttccgaagtgtaaagggtccataacaacagacccaaagtgcaaggggtccataacagctgacccaacggtgggcttgacctgtgaggaatgcgggagagcatttacatcaaaaatcggtctgggacagcataaacgcctagcccacccggtgctcagaaacatcgagcggatcgccgccgctcaaccaaaagcaagtacgaaaagagggctacatcggcagtgctggacagaggaggaagtggaactactacgaatattagagaaacagtacgagggaagtaagaacatcaacaaactgattgcagagcatattccatcaaaaactgcaaagcagataagtgacaagagaagaggactctctaagagtccggaggaggagggtgagaaagaccaagacccagagtggagaaaacaaatgacaatggagcaagaccatcccaggggcgttggatcagatacggagggaggactgatttcccactataaaaagagaattgcagagtggataacatctgagaaactgcccattctccagggtgtgtttgaagaggtgctaaatgggaatgagaacaccgattgtttggttcaagaggcaactgacgaatactacccacacctattcaggaggtccacagagcctgaaacaaaccaagatgaaaagcacccagggcacagtaaagctaaccctccaggaccatctaaggagtggatgaaaaagagggcaagaaaaaggggacaattcctaagattccagcggctgttttaccgagatagagggaaactagccggtatcatcctggatgatgtggagtccctgcagtgcggtatcccgcttgaggaggtacataaagtgttcaagtcgagatgggaaacaccgggaacatttaagggcctgggtgcctttcgatcggcaggccaagcagacaactctgcattcaaagccatgatcacggcaaaggaaattgcgaaaaacatcagagagatgaataagaaagcagcaccaggaccagacgggcttagtctgagagatctcataaaaatagatcctcactatacccaagtcatggaactattcaatctatggttgctgtctgggaatattcctgacgtggctagagaatgccggaccgtgctaatatcaaaatctgcagtgccagagcgccaaaaggacatcaataactggcggccaattaccatcggctctactgccctgagactgttctcaagaattctaacggcacggttaaccaaggcgtgccccatcaatccaagacaaaggggctttatcaagtcgccaggatgtgctgagaacctcaaactattacagctattaattcggagtgctaagaaggagcaccggcctctgggcgtagtctttgtcgatttagccaaagcctttgacacagtgagtcattctcacatcttaacagttctcaaacaaaagggtgtggacgagcatatcatcaaattaattaaaaatctctatcataatatcaacacccgtatcgatctaaagaacaaacaatccgaacccattggtatgcaaattggagtaaagcagggtgatccaatgtccccgattctattcaacttatctgtggaccccctactgtgtaaactagaggaggaaggaagtggagtccagtacggctctagaaatataacaactatggcctttgctgacgacttggtactactaagcgaatcatgggaaggaatgaagaaaaacattgaaattctagaggtcttttgcgagctcactggcctcaaaacacaaggggagaagtgccacggttttttcatccaaccgacaaaagactcatatacaatcaatgactgccctccatggacagtgaacggcacccccctcaatatgatcgagcccggtagttctgagaagtacctgggtctgcgcgtcgacccatggaccggaatatctaagccagaactacaacaaaaagtgaagggatggctgcaaaggatcaacgatgctgcactgaagccgttccaaaaggttgacatcctgaaaggctacaccattccaagactgatttacttagcagaccaagccgatgtaaaaacaacatacctagagacccttgacttggagattcgaacggcggtcaaggagtggttacacctaccaccatgtacttgcgatgccatcctttactccagcactcgggatggaggtctcggtatcactaggctcacgggcttgattcccagtgtgcaggctcgaaggctgcacagaattgcacaatcttcagacgaaacaacaagagagatagccaagaaagagggcattgagaaagaatatgcgaggctgtggatcgcagcaggaggtaacaaagacaagattccacccatatgggacccaagagctgtaacggtgatatcggaaggacaaggcggcgagaaacaggtctcggaatgggagctacctgcccccaagaccatctatccgaagccctgtgattggcgaaatcaggaatttacgaactggactaagttgataacccagggccgtggcatttccaactttgaaagtgacaagatcagtaacagttggttagaattttataggggcattccacacaggaagctacttaccgcactacaactaagggcaaatgtttaccccacgagagaatttctaacaagaggaaaacaaggaaccccgatgagagcgtgccgacattgccaagcggaagccgagacctgcgcacacataattggatattgtccggcagtacaggatgccaggatcaaaagacacaaccaaatatgcgaggtactaatggaagaggccaaaaagaaagaatggactgtgtttcaagaaccacacgttcatgacgagcgaaatgaactgtacaaaccagacttggttttcgttaaagaaaaccaagccatagtggtggatgttacagtcaggtacgagagtaaatcaacatcattggctgatgctgcggcagagaaagttaggaaataccaacacctcaaagaccatataaaagatctaacgaaagccttaaacatcaaatttatgggcttcccaataggagcacgaggaaaatggcaccctggaaattatgaattattgaaagaacttgggctctcttcctccagacaggacaaagtggctcggcgtctatcaaatcgagcactgttctcctcagtcgacataatacacatattcgccagcaaaacaagaactgtcatcagatcgacatga

SEQ ID NO: 31011 - DNA, 3738 bp, Colaptes auratus
  source 1..3738: mol_type = genomic DNA
atgggtcggcaactgcgtagcctttttgccaccataggcacccagaccactcctaaagattggctggatgttgcgaccacagataatacgagaccaccagatgaggaaataagggtatgttggactggaattgagtttgtgaactcaatgatagccaagaacaatatagcctataatcctatctggaatgagaaactgatgatattgccggaggcttatgaagggcccacttccccagctcgtgagaaaggcatccgagatcagagcctagagaggagcaggaatgaggatgtggactgtcctgaaaccccgagctctatgagtcagctctcaatactaaccgcatcgcccgagctggagaatacagcggacacctgtcctgggactcccctagtgaggatgccagatgacaatccggcttgtccatgctgtaccactcgggcaggcaatctgacgagattgattgaccatctaaagagagcccatgggaaaagaaagatcaccttccagtgttctcgctgtgaaaggacgaatgaaaaccatcatagtatctcatgccatatcccaaaatgcaaaggggtccaagagcctacccagatagaaggatttagatgcgaagagtgtaataattgttttaagactaaaattggcctgggacaacataaaagactagctcacccagccctgagaaatagagaaagaattgaagcttcccgccccaaggagacctctaaacgaggtgctcacaaacaagtctggtcccaagaggagacagaaatgttgcagacactaagtcaagaatttgaagggaggaaaaacattaataaactgattgctgaaaagttaacaactaaaacagcaaagcagatcagtgacaagagaaggctactaaaagaaactttagtgccagagaaagagaaaacaccagagcgcaagagcaggttaaagaaggggaggactgagattccatcttccggtgagggggagttaatagcccactatagaaaaacgattaaggaaaagatatcgtcagggaagctgcccatccttcaaaatacatttaaacaaataattgaaggcaaaaaagactcattaaaaatactcaatgaggtagctcaggacaaatatttgcatctgtttgagaaggcaattgaacagaaagcacctaaacagagccaacgtaagccccagcagagaaaaagtaaaaaggagtggatgaagaaaagatctaaaaaacgtggagaatttctccgattccaacgcctcttccagttagatcgtgggaagctggctaacatcattctcgatgagaaagactctgcacagtgtaccatccctctggaggaagtcagtaacacctttagatctagatgggagtctcaaaacacatttcaaggactcgggacattcgagtctgtgggacgggcaaataattcggcatttaaggacttgattacagagaaggagatccttaagaatatcaaagaattgaataaaaaatcggcaccaggccccgatgggatcaccctgaagtccctgcttaaaatggatccagattgtaaggagatcagagaactatacaatctctggctgttaagtggtaaaattccagatgtggtaagggggtgccgaaccatcctaatacctaagtcatcagcgcccgaacgccaaagtgatattaacaattggcggccaattactattggttccatcatcctgagactctattcaagaatcctaactgcaaggttggcaaaagcatgtcccattaatcctagacaaaggggctttattcagtcctcgggatgtgctgagaacttaaaattgttacaattaataattaggaatgcaaagaaacaaaagaaacccctgggggttgtctttgttgatttggccaaagcctttgattcagtgagccacacccacatcattgaagtgctaaaacaaaagggccttgatgaccacataatagatttaattaaggacttttatcataacattcacacagtaattaaaaccaaagaaggtgagactgagtctataggaataaaaactggtgtaaaacagggcgaccccatgtcacctctcctatttaatctgtgcattgatcctctgttatgtaaattggaagaatgtggggaagggttccaacacgggaagggtaaaataacagctttggcttttgcagatgacctggtcctgctaagtagttcccaatcaggaatggagaaaaacattgaaattttagaagcattttgtgacttaactggactaaaaactcagggtgagaagtgccatggcttctttgtaagaccaaccaaggactcttataccatcaatgattgtcccccatggctagtcagcggtacccccctaaacatgatccatccaggtcaatcagagaaatatctaggcttgaaaatcgacccttgggtggggctagttaagccagaattgcagaacaatttagaagtttggctcaatcgtatagagagagcccctttaaaaccatttcagaaattggacatattgaaagtgtacacagtgcctagattgatttacttagcagaccaggcaaatgtaaaatccacctatctggaaaaaatggatttaacaattagaaatagggtgaaaaattggttacatctcccaacttgtacttgtgatggcatcttgtattccagcactaaagatggaggcctgggcttaacccgattggctgggtcaatccctagtatccaagctagacgattacatagattggctaattcatcagatgacacagttaaaactgtggttaaagagaatgatattgataaagattatgaaaaattgtgggtatcagcagggggagacaaagataaaataccatcaatttataacccccaaacaataatggtagccgaatatgggggaagtgaggaattatctgaatgggaaaagcctgccccaaagaaaatctttcccaaaccttgcaattggagaaaaaatgagttcaaaaaatggactacattgatgtcccagggcataggaactgcagtctttgaaaatgattccaccagtaaccattggcttgtgaattacaaaaatattccccacagaaaattactaacagctttacaattgagagcaaatgtatatcccactagagagttcctagcaaggggtaggaaagaggaccaaaatacaaaatgccgtcactgtcaggctgataacgaatcagttgctcatatcattgggtactgtcctgctgttcaagatgctagaatacgcagacataattatatttgtaagatgattagtgaagaagctaagaaaaaggagtggctcgtatatgaagaaccccaaatcagagacaaggacttgaatttgtataagccagatttagtgtttgtaaaagaaaacgtagcttatgtagtagatgtcactgtaaggtatgaaagtaacataacaaaactgaaacatgcagcagaggaaaaagtgaggaaatataaacatcttagggaggaaattgttgaattgactaatgctaatgaggttaaatttgcagggtttccattaggcgcacgagggaaatggtatgagggaaactacaagatcttgtcagaccttgggctttcaaagtctcgtcaaagcagagttgcacggcgactagcatcccgtgcgctgctcacgtctgtggacatagttcatatgtttgcaggtaagagcaggaaagtgacaacaaatcccgtataa

SEQ ID NO: 31012 - DNA, 3741 bp, Cossypha archeri
  source 1..3741: mol_type = genomic DNA
atggggccgttgatgcgtcttatgtatgtatcgacagccactcagactgatattaatgatttgaaacttgtcgtaactaaattaaaagaaactataatccccgtaacaataccatcagatgatattgaattacaacgattagagttctctaactcgaaagagatagaggactggcaaacaattgaatttgctaaccaatgggaaaaattggctttatacccggaagtttatgagtcattaccatcagactcaccacaagaaagtaatgttactccatctgataataacatcgatgccgacggagatggagaggactcctttgccctggctactgaatttgttttagatcctcataaagatgacttgccaggagaaataccactcgttatgttaccggacaaagcaccatcttgtccgtgttgtaaagttaagattatgggaatagaaaagcttgtagaccaccttttaagatctcatggaaaaagaaaaatcattttccaatgtattacatgtggtctacaaagtgaaaattaccgctctatcgtttgtcactatccatcgtgcaaaggtgctagtgaggtgattccatctggtgattgtgtatgtgaggagtgtggaaggagtttcccaacacaaagaggcttgggacaacataaaaggcatgctcacccggacgttagaaatcaggaaaggattgatgctgctcgacctaaagctaaaatacctcgggaatcagcccgtaaatgttggacaaaagaggaggaggaattgctgaaaaaattaatagaacaatacgagggagaaagatacatcaataaattgattgccgaacatattccaactaaaacggtaaaacaaattagtgacaaacggcggtgcatgaatcctgtacgtaaggaaaggaaagatcaggaaagatgtgtacaggtggaaaaaagaaagaaacagccagtaactacggaaccatcgaacccggatcagttgagagcacattatatggaaacgatcaggaaagggataaaattaagaacgattaacatctattccagggcattccgcaaaattgttgagggggttaaagatcaactaacattaattaatgatactacagaggactggtatggacaccttaaagctagatgtctagcagagaggaaccctaaagtacaatcaaaaagaggtaaaacccaggaaacacgaagtaagagaaaagcgacaaattggatgaaaaagagagcaattaaaaagggacgatatttgagatatcaaaaattattttataaagatagagggaaattggcaaatattattcttgatgaggttgaatctgtaaaatgtgaaataccacttccagaagtattctctgtgtttaaatctagatgggaaacaactggtaaatttaaaggccttggacattttcagtctaagggaatggcagataacagcgcctttaaagttatgattacagaaaaggaaatagttaaaaacatcaaggagacaaataaaaatgcagcgccaggaccggatggaattacaataaaagacttgattaaaatggatcctaagtttgttgaaataactgaactctttaacttatggttaacatctggagagataccagactcattgagaggatgcaaaactatattaataccaaaatcaactaaaccagatcgattgcatgacatcaataattggagacccattactatcgggtcggttattttacgattattttcgagaatattgactgcaagattaacaaaagcatgtccaataaattcaagacaaagaggttttattaaatcgcctggctgctcggaaaatctgaaattgttagaacttattataaaaaacgcaaagaaacagcatagagaactgggagtggtattcgttgatattgcaaaagcctttgatactgtaagccaccaacatattattatgggtttaaggcaaaagggggtggattctcatattattaatttaattacaaatatgtataagaatatttatacagaaattggcattaaaggagaaagatcagaaccaattcagattaaagtgggcgttaaacagggtgatccaatgtccccgttattatttaatttggccatggatcctttgctatgtgaattggaacaaaatggaagagggtatcactatgatgctaattcgataactgcgatggcttttgcggatgatctggtcttgcttagtgattcctgggaaggtatgagggaaaatatagagattttggaagcattttgtgatttaactggtttaaaaacacagggagagaaatgtcatggatttttcattaaaccaacaagagactcttatacaatcaatgattgtccaccctggacagtgggtggtacacccctcaatatggtttgccctggtagttcggaaaagtatttaggccttcaaattgatccttgggtacaaatagctaaaccggatttgtcatctaaaatagatacttggctggatcgtattagtgagtcacctcttaaaccgctacaaaaggtagacatcttaaaaatatacatgatccctcgaataatatatttagcagatcatacagacatcaaagcaggattcctagaagccctggacttaaaacttagggcaagaataaagaaatggttacatctaccgactgatacttgtgatgccatcctttattccagcacgaaggatggaggactgggcattataaaactacaagctctgatcccgagcgtacaagccagacgactacatagactggcacaatgttccgatgagaccttaaggaatattttacaacaagaaaacatcatgcagaagtacgagaaactatggataacagctggaggagataaagaacaggtaccggatatctgggcacccaaaccaacggtgccaacatcacacctgggtgaagaagatacatcggagtgggagataacaacacctaaaaacatctacccacggccttgtaattggaagaagatggagtttcggaaatggactaaactccaatcccaaggcattggaatcatcaactttgagggggatacgatcagcaacaactggattaagaactatcgtggtatcccccataggaagctcctgacagctctacagttacgagcaaatgtgtatcccactcgagaatacttggcgagagggagaaatgatggacggattacatcatgcagacactgcaaggcggagaacgaatcctgtgcccatatcatcggccaatgcccagctgttaaagatgcgaggataaaacgccacaattacatctgtgaaatgctttcaggcgaagcgaggagaaaagactgggttgtctatcaagaacccattataagagattcaaaaggagagctatttaagcccgaccttgtctttgtcaaagagaaacaggcactagtcgtagatgtgacagtacgatatgagggagaaattaacaccttagagaaggcagctaaagaaaaagtcaagaaataccaacatcttgagacagaaattcaggaattaacaaacactgagaaagtaacttttataggctttccccttggatcgagaggaaaatggtataataagaattttgatttgttacagactcttggactgtcatcgtctagacaagagagaatagcgcgggccatggcatctagagccctcttcagctccgtcgacatcatacatatatttacaagcaaggttcgtacagctattgacaagtag

SEQ ID NO: 31013 - DNA, 3693 bp, Cossypha dichroa
  source 1..3693: mol_type = genomic DNA
atgatacaaccaatttcgttgcgttacatatcaacggccactcagacggacccgttagatctgtgggtcatagaggccgatgttccatctgtcccccccacatcaagtgatgatgggttcgagctggtatgtctagagtttgtgaattcctcctatagagaggagaatggattccatctggaaattgtttgggagggcttggccaatttacctgaaccttatgagaccttgcccttggggctggttcagggtgatgaatctgagtgtgttcaaacggttgtcgaagagcctaaaacacctgaggctcttcctaggcccagcggtgatggggcaccgactggaacacctgtggtgtccgtcccggacaaaaatccagcatgtccacgttgcgccacccgttttactcggatgctggggttgattgaccatctgaagagaaatcacgggcagaaaaagatctggttcaaatgctcgaagtgtggtaagcaaaatcttaaataccacagtattgcctgtcacttcccgcggtgcaaaggggaggtatgtgtggttccaactggtgattgggtttgtgaggtgtgccagcggagttttaccaccaagataggcctgggccaacacaagaggctgatgcatcctcttgtgagaaatttggaacggattgaggcctcccgtccaaaggtgtcatctttacgaggggcccacaagagggtgtggacggaggaggaggaggtcctcctgagtcaactggtggtggcatatgctggtagaaagaacatcaaccaactgattatggagcacataccatctaagactgcgaagcagatcagtgataaaagacgccttctgatgaaagttccctccaagaaagatcgagttgaagaggaaggtgcggggaaagaagagcttccccagagtgctgatctgccacaggagggacagttgaagctccaatactctgatgccatcaagagaatgttggcggcatgtgagttcaccagctgccaggaggccttcgcgaaaattttagatgggcaagatccgcaaacggtggtgaatgaggtttatgagaagttctttggtagcccgggtgggcttagccaggatgtaaaatcttccaggggccggaagtcacgagaggatcagaaagcatccagggcaacaactaattggatgcgaaaaagggcaaagaggaaagggaaatatctccgatatcagagactgttccatttgcacagagggagacttgcacggatcatattggataacatcgaggccgtacagtgccaaataccatctgacattgtccacgctgcctttaaagctcgatgggaaacatcagttggtttcaagggccttgaatccttcccaccgcatggggaggccgataacaccgtttttcaagccctgattacggaaaaggaggttgaaaagaacttgaaagaaatggcaaagacctctgctcctgggccagatgggattactttgggtcaacttcttaaaaaagacccaaagttttctctgttgacggaaatcttcaacctctggctggttactggaacgatacctgatttgctccgggcctgccggacagtcttgattccgaagtccaccgatttggaaagggtgggtgacatcaacaactggaggcctatcaccattgcttcgacggtgcttaggttgttttccaggattgtgacggcgagactgacccgagcttgtcccattaaccccagacagagggggtttattcgggcgtcaggatgttccgagaatttgaagctattgcagcttctggtgagacacgctaaaagggagcactgtgacctgggggtcgtgtttgtggacattgccaaggcatttgataccatcagccatgaacatattattatgagtttgacgcaaaggggggttgatccccatgtgattcagttggttattgagttgtacaagaacatcagtacatatattggtatgaaatctgggaggactgacccgattaagatcttaagaggggtcaaacaaggagatccgatgtcacctattttatttaatctcgcacttgatcctcttttgtgtaaattggagaatgatggttatggattccagcgaggatgtttaagacttacagctatggcctttgctgatgatctggtattgttaagtgactcctgggatggaatgtgcggtaacatcaagattctggagacattttgcgaacttacaggtctccagacgaaaggggagaaatgtcatggcttttacatcaagccaactaaagatgcatataccatcaatgattgtccagcctggactattaatggttccccacttaatatgattgacccagggaattcagagaaatatcttggtatacaaatagacccctggactggctttgctgattcaggtttatcgaggaagctggaagaatggctccagcggataggggacgcaccactgaaaccccttcaaaaagtcgatatacttaggacatataccatccccagactaatatatctggctgaccacaccgaagttaaaagtgggcccctcgaatcccttgacttgattgttcggaatgaagtcaaggtatggcttcacctccctccaagtacgtgtgatgcgatcctgtattcgagatgtaaagatggtggtctaggtattatcaagttatcggcgcttgttcctagtatacaagcgcgaaggctgcacagactggctcaatcttcggatgagactctggtacaatttctaaagggggaacatctggaacttttatatgagaagttatgggtacgtgctggtggcgagaaggagtccatcccgacaatttgggagcctattccagtggatgatagtgttgggagtggtggtgaaggtttgtcggaatgggaggcccccgttcctaaagtccgctacccgagaccttgtaattggcggaaagttgaatttaatagatggaaacgcctggtagcccagggccatggtattgagaattttgagaatgataacatcagtaatggatggttaatccattataggggcattcctcatagaaaattaattacagcattgcaattaagagctaatgtctaccccacaagagagttcctggccaggggtagaggagatgtctacgtaagatcttgtagacactgtgatgccgattatgaaacaacagctcacataatcggtagttgcccaatcacgaaagaggccaggattaagcgacataattccatctgtgagactcttagcaacgaggctaagagggagggttggtcggtatttcaggaaccacatatacgtgatgagaaacaggaattgtttaaaccagatttgatttttataaagggaaataaggcacttgtggtcgacgtgacggtgaggtacgagcacaataactcctcattaaaggaggctgctgcggaaaaggccaagaaatatcagtgcctggtacagcaaattaaagatctaactaacgcagctgaaattgaatttataggctttcccattggggcgcgggggaagtggtatgagaagaactctgagttgttaacggccctcggtctctctaaaacgaggctagggaaaactgcccgggccctagcatccagagcgctccttacttccgttgatattgtacatatatttgccagcaaagcacgaaccgttgtatccaataaataa

SEQ ID NO: 31014 - DNA, 3642 bp, Falco fasciinucha
  source 1..3642: mol_type = genomic DNA
atgacacatacagaccctatcatacggcagctgggcgccgataaaccagtgaccagggggaatgggacgggttcccctggtccagtgcgactgtccccgagaagaaataccgggccggatttccgctctcgtaagtcaaccggccccactggtaacgaccatgtgaaacgcccatcgattatggtacgcagagaccgaccagatcgtttcgttctggactacggctctcacgcggtggtgttaaggggaaaacaactacccaaagaactggcatgcggacctccagaaacgagtctggtaacgcatgtcccggttggtggggacttttcgctggacattccatgcgccgaagcgttgttgcgctgtcccatttgtccacggcaattctcatccccgtcaagctggggggagcacctgtggtgtcgacataacaccaagccgatttacaggtgtacagagtgcggtagagagagtggtcacctacattcgctgaggtgccactgcgggaagtgttcgggccggacaacgggtgacgtccccgccccaacggacggcgactttatatgtagcgaatgtggccaagcattcggcacggccacaggccgatctcagcacgaacgtcacaggcatcctgcgcttgcgaataagcgcaggatcgactcctacaacctggagttggcgaagaagaaggccctgcgtgctgcagctacactacctggaaggcaaacaggtaagggttgctggtccgcggaagaggtagcgattctcatatcgaatggagaaaagcttaccagggcgggatgtcgccgtgtcaaccaggcgctagccccgctcctgcccgataagaccctcaaacagatcagctccaagcggtgcgatctgaagcgtcgaaatgagaggtcggagaccgagtccggagagagagcggaccggaatgtagggaccgagtccgaagagagagcggaccggaatgtagggtctgaggtgacagaccatagagtcccccagctcagcgaaactgaaggggaaataacgggaacagctccctcccccgagtggaggagatcgtttaaggatgcagcgctgcccggacgctcggggtgggctgcaacctttgctgaatgcctccaggaactaaatgcggaggtcgcaaacgatagctgggaccgctttacgagaaacgtggatgagtggatcacgcagttgcggcagcgtagcacgcgaggcgaacgcgtgggagccgaaagagtcacgacgactcgtcggccctgtaggaatctgggtaaacgcgcacgaagagcgacgttcgcgcgataccagaacctattcgatcggaacaggaaaaagctccttgcggaggtgctttgcgagaacaagcagggtgagtgcctcgtccccatgaacgtgatcgaagagacgttcaaggagaggttctcgaagaagggtccggaggtggacttaagcgcatacccggcctcagccatggtgaacaactcgccgctattaacgccgttcacgatggaggaggttgtggatgcgcgccgaagtatgaagtccgcctcggcaccaggaccagacggtatcaccccgcggcaggtgaagtcgattgaccctgctgaactcgtgaacatcttcaattacatgttactggccgggaaggttcccgatgtcttgaagcttggcaggtcggtcctcctcccgaaaaaagaggacagcccgaatgacctgtccgactggcgaccactgacgatttgttccgccatttatcgtctatatacgaaactgctcgccactcgtatgcttcaggtaactcccttgaaccctgcgcaacggggattcatcaatgctgacgggtgcagtgagaacttgttcttgctgcgccagcttatgcttcgcagcatggggaggccagtgggtccaaggattaagcggctggacgtagcctttttagacctggcgaaggccttcgacactgtgtcgcactctctcgtatttgcgggcatgagaaggctgggcttccacgaccatatgatcgaagtggtcaagggtctttacgagggctgcttcacgaaattctcggtccgagctgagtcgagcgaacctatcgaaatcttgcgaggggtccgacagggagatgcactctcgcccctcctcttcaatattgccacagatccgctgatggacgctctatcaaaagactgtggtattagcgtcgacggagcgaacattgggtgtctggcttatgcggacgacaatgccctggtggctgactccgcggtggggctgcaacggtcggttgaccggtgcgtgcggttctatcgcgaggtgggtctctcggtcaacgtcgccaaatgtgccacattctcaattacggcgagagggcgctcctttcacgcaaataggggcgcccccccggagatcgatggagttccgctcccgcaggtcggccctgcagagaaggcatcctatctcggtgttaggttaggtccctggagcgacgaggcgtacatttcggtggaacgcgtgaccctgcaaatcgacttgctgtgcagggcgccactgaaaccacggcagaagttccatcttttgcagcagttctacctgcctaggctgttttacggcctgtcgcaggtgctgccttctaggagtacgctgatggcgatagacacggctatccgccaggggacacgtaggatgttgcacctgcacgagtcgaccgcgaactcgttcctgtacagcagcagatgcgacggagggttggggctcgtctgcctgacggagtcgataccctccagcgtgattcggcgcaatctacgcttgctctgctccgaatatgaggcagtgcgtacactggcccggacggcgggactcgccgcgcgaaacagcgaagttacgcagagatatggcctgccaccgattcgggcagacgagacggagtacgcccccatgttccgacaggatcactcccttgattgggagtccctgccggtgcagggccagtgtgcgaagtctttccgaggtgaccactgcggaaacgcatggatgtcgaggccgggcgggattacggaggaaagctacttgacttgcctcaagctgcggaccaacacattccctacccgcgaatgtctgacccgaggaggtcgaggactgaaggcttgtcgacgctgtggagcgccgtccgagacagtttcccacatcagcggccaatgtccgaagctcaaacgtgagcggttggccaggcacaatcgaatatgccagctggtggcggatgaaagcgcacgacacggctgggtggtaggcatagaaccatccttccgtgtgaacgggaccagactaatccccgatttggtgctgcggagagcggacagaactgtggtgatcgacgtcacggttagatacgagcaaggcgatgctctgagagacgcggcctccgagaaggtgaggaaataccgtccgttgatcgcgctgctgggggccacgggcggacaggtcgagatacacggtctgccgattggggcctgcggcgcgtggtcggcggcggctgaccgagccttattggcgctgcgtataggggacgaaggcttcagacgaagattgtgtcaacatgccatgctatcgacgttgggcatgctcagggattag

SEQ ID NO: 31015 - DNA, 3717 bp, Gallinago paraguaiae
  source 1..3717: mol_type = genomic DNA
atgggttggtccggacggttgtgctttgtgtccgtggccacccagactaaatatttggattgggcactatcggttccttccatcttgaaccctgatctggtagggggtgggattgcggaaagaaaaagatgggagtttgttaactctgagaaaggttatgtgttggtgctttccccctcccgatccagcttacttgatacgttaccggagccgttcgagtctccgaaggtgtcgggcaggactatcagcccaagctctgtgcagaccgaatatacaggagaaagaacatcatctcctccaataacaccacctcccatcttggaagccggggcagatcctccgcaggagggcacacctgtggtaaagatcccagacaaaaatccagcttgtccatgctgcggcaaccgaatgggaaagattacgggactggttgatcatctgaagagaacccatgggaagagaaagatcttattccagtgtgcccgttgtgggagaacgaacccgaaacatcatagtatcgcttgccacatcccaaagtgtaaaggcgctgaggagcccagcatatcgatgggctgggcctgtgaggaatgcaatagaacatttgggacaaaaattggtttgagtcaacataaaaggttggcccatccagttacaaggaatgtggaacgtataacagcaacccgcccgaaagaggaaagtgcaagaggtgcacaccgtcggtgttggtcggaggaggaagtggaattacttaagaagctggaaaaacaatatgaagggaacaaaaacatcaataaattaattgcggaacatcttccattgaaaacaacaaagcagataagtgacaaaagaaggggactggtgagaagtccatctaaaaagaaggtgaaagagctggggataagagaagaacttatgaaagagggagaatatctggaaaggagtggctcccaagaagaggggggactaaggtcccgatatcgaaagtcgattgcagaatggttaagaactcggaaaataaccactctcagggagatctacgagagagtgatgaaagggaaaaaagatcttcccgcgctagtggatgaagctgcccagggccactatgcatgcctgaaaaaagatcttttggaaggggaaagacggcaaattcagaagatccgagaaatccgcagatcccgtccacagaaaccatcaaagcaatggacaataaagagggccagaaaaagggggcagttcctacggttccagcggctattccatctggatagaaggaaactggccggtattatcctggacgatgtagaatccctccaatgtggtattccacttgatgcgatacatgaggtattcaagtcaagatgggaatcacccggaacattcaagggcctgggtacattctgtaccaatggacttgcagataattcagcattccaacctatgattactgtgaaggagattgagaagaatatcagagaaatgaacaaaaatacagcaccaggaccggatggggtcactctgcgggatctcatgaaagccgatccccaatgtgtcaatttaatggaattatttaatttatggttattaaccgggtatataccggatggcattaaaaattgtagaacaatattgatacctaaatcaaatgtaccagaaaagttaaacgatgtgaacaattggagacctataacaattggctcgattatattaagattgttttctaaaatattaacggcacgattaagtaaggcatgcccaattaatacccggcagagggggtttataaaatcgcctggatgctccgaaaatttaaaattattacagcttgtgattcagtatgcaaaaagggagcaccgccctctcggggtagtctttgttgatctggcgaaagcatttgatacggtgagccatgctcatataatagcagtattaaagcaaaaaggtgtggatgaacatataataaatttgattgaaaattcttatcataatattaagacttatattgatatgaaaaaggaaaaatctgactcaattggaattcgaattggagtaaaacaaggcgatccaatgtctccaattttgtttaacttatctgtcgatcctctattatgtaaactggatgagattggtaatgggtttgagtgtcatacgaaagttgtaacatcactggccttcgccgacgatttagtattattaagtgggtcctgggaaggcatgcagaaaaacatagaaattgtcgagaccttttgtgaacttacgggtctcaaaatgcagggggaaaaatgtcacggcttttacatcaagccaacaaaagattcatatactatcaatgattgtcctccttggactattaatggcaccccccttaatatgattgaacccggtagctctgagaaatatttgggtctccgtatagacccatggacaggaatatctaaaccagaactactggagaaagttgatagatggcttgcgaaagtgggaaaggctcctttgaaaccttttcagaaggttgatatcttgaaagggcacttgatcccaagattgatataccttgcggaccaagcaaatttaaaaccaactcatttggaaaatattgatttggccatacgaaacggagtcaaggagtggttgcacttaccagcgtgcacatgtgatgccatcctgtattctaatactcaggatggaggattgggaattaatagattggcagcattaattcctaatgttcaaactcgacgattacatagaattgcccagacaacggatgatgtattgaaagagattgtgaaacaagaaggaattgagagagaatatgagaaattgtgggtaatggctggtggtgataaggaaaagataccatctatatgggacccgaaatcaataatggtaatatcagaaacgggcggggaagaactatcggaatgggagtcccccaatccaaaattgatttatccaaaaccttgtaactggagaaaaagggaatttaacaattgggtcaaattgtcaacacagggtcgaggtattagtaattttgaaaaagataaaataagtaataattggatacaacaatataggggcattcctcaaaggaaagtaattacagcattacaattacgtgctaatatctatccaacaagggaatttttagcgagaggacaatcagaaacatatattaaatcttgtcgtcattgtcaggctgatatagaaacgtgtgcacatataattggctattgtccatctgtacaggatgcaagaattaaaagacataatcaaatttgtaatatattggcagaggaagctaagagtaaagattggcttgtgtatcaagaaccattattaagagatgaatcaaatgaattatataaacctgatttaatttttgttaaggagaatcaggctattgtgacggatgtaactataagatatgaaataactacaaaaacattggaagaagcagcattggcgaaagcaaaaaagtatgctcatttaaaatcacaaattcaggacttgaccaatacttctattataaattttacaggctttcctttgggatcccgtggtaaatggtaccagggtaattacaatatattaaaggatttgggtctctccagttcccgacaagagaaggtcgccagacgattgtcgaattacgctttatttagctcggtggacattgttcacatgtttgcaagtaaagcgaggacagaggtaagataa

SEQ ID NO: 31016 - DNA, 4179 bp, Garrulus glandarius
  source 1..4179: mol_type = genomic DNA
atggaaatctccaaaccacttttggggccgccgatacgcctgtaccaggtatcggtcggcacccaaacctccaattccgattgggttgacctggtgtcccgggatttcaagccgggctcctcgtctaagtcttgcggggtggacctggtgtctttaacttctaaacaccgggtagccctgctgtctaaaaccgatcgggtagacctggtgtattttacttctaaacaccaggtagacccgctgtctaaaactaaccaggtagacctggtggctcaaaattttccatctggctctcctaattcggcagaaaatgaattagatctggtgaacttagagttttatagatcggatctgtatgttggtaatgtggatggtcatttttctgtgaatcgggagggtttgagcgggctgcctgaggtgtatgaacagcttacaccacaaccgagtgcgggagggggcgaccacctccccaaggacagtgaagggattgtgcttagcgacggggaggaaagcggcgagcacgagcgtgagagcgcctcggaaacttcgcctcctgagctccagaacacctcggagacttcgcctcctgagccggagacctgcgttgtaccggcaacatcacctcctccaccagatgcccacgggaaggaggcaccgggggactccctagtggtgactattccggacaaaaatccaccttgtccatgttgtgggacccgggtggggggggtggggggcttgattgaacatctcagagaagcccacgggaggaggggggtctgttttcgatgtgctaagtgtgggaaagaaagtaacaactgtcatagtattgtttgtcactttcctaaatgcagggcaaagacagaaacggctccagctggggagtggatctgtgaggaatgcgggagagatttcaaaactaaaattggcctgggacaacacaaaagattggcacaccctatgataaggaatcaggagaggattgctgcttcccacccaaaagagacctccaacagaggagcccacaaaaggtgctggacaaaagaggaggaagaactactgataagattggaaactcagttcgagggcaacaaaaacatcaataaactcatagcagaacatatcccaactaaaacagcaaaacagatcagtgacaaacggaggctgctgcccagaaaaccgacagaggatgtttgtgaagagcctggggtgagtcatcgcaccaggagagcagctgcgggactaaaaatagaacctgggccgagtaatcagcctgggaaaggagtagaagataatgaacctgagataagccaccgtctcaggaggccagctgccgggaggggagcggaaccagagataaggcgccgccctgataagaggacaaaggcgctgggaaacatcgaccagcagagggaggggcaactgcaggcccattatcaaaagaaactcggtgagtggctttcagctgggaaaattaagaccttcccacgggcattcaagcagttaatcaagggacaggagatgcagccggtggtgaatgaaacagcgcaggactgttttggatgcctgcaggcgataagccacacaaaaacagcaagccgagataaggaaaagagggaggcccaggagaaaaaaccgacaaggccttatcagaagtggatgaaaaagagagcagtgaagcgaggtaaatatctacgtttccaacgtttattccatctcgataggggaaaactagctaagattattctggatgatgtagaatgtttgtcctgtgatatctcacccagcaaaatttattcggactttaaagccagatgggaaacacctggtaaatttgatagccttggggactttcaaattaatgggaaagccgacaacagtgctttcagggacttaattacggctaaagaaattgagaaaaatgtgcaggagatgagcaggaacgcggctccaggtccagacgggtttactctgagagacatcaagaagatggaccccgagtactcccggaccacggagatcttcaacctgtggttaacatcaggaaaaatcccggacacagtgagggggtgcaggactgttttaatcccgaagtcacccaggccggagcgcttaaaggacattaacaactggagacccataacgattggatccatcttgctgcgtctgttctccagaactctaacagcgaggttaactaaagcgtgccccctcaacccaaggcaaagaggctttatcagagcggcgggatgctctgaaaacctgaaactcctgcaaactataattcgatcagccaaaagagatcataaaccgctgggtgttatatttgtggacattgccaaggcctttgacaccgtgagccaccagcacattctacaaggtctgcaggaaaggtgtgtggacccccatatcgtcagcctggtgagcaatatgtatgagaacatccgtacatatatcaccacggggaaaacacagacagaccacatccagatccgggttggagtaaaacagggcgacccgatgtcaccctttttatttaatctggctatggatcccctgctatgcgaactggaaacgagaggcaaagggtaccaccgagggccgagcagcgtcacagcgatggcattcgcagacgatctggtcctgttgagtgactcctgggaaaacatgaagcagaacatcaggatagtagagaccttctgcgacctcaccggtctcaaaacacagggggaaaagtgccacggcttcttcatcaagcccaccaaggactcctacactgtcaacgactgcgctgcttggactattaatggcacacccctgaacatgatccaccctggagaatctgaaaagtacctgggcctgcagattgacccctggactgggctagcaaaatccgacctatctacaaaacttgaaagctggcttgagaaaataggcaaatctcctcttaaacctctgcagaaactcgatatcctcaaaacatataccatccctcgactgacctacctggctgaccactcggatctgaaagcagggttcctcgaggcccttgaccagacggttcggacgacggtcaaggaatggctgcatttacctgcgtgcacctgcgatgccgtcttttactcgagcacgagagacggcggtttaggcctcaccaaactggcaggactgatccctagcgtgcaagctcggagactgcatcggctcgcccaatcttcagacgagaccatgaagttgttcctggataaagttcaaatggaacaactgcataagaaactgtggattcaagctggaggggacagggagaagataccttcaatttgggaagcaaaaccggcgaatgtaccatctacctcatgcagtgcagacattacttctgagtgggaagcaccatccttaaaaactaaatttcccaaaccgtgcaattggcgtaaaaatgaatttaaaaattggactaaattagtgtcccaaggccggggaattgaaaattttgagggagacaaaattagcaaccattggatacaatattacagaggcattcctcacaggaaactccttacagctttacaactgagagcaaacgtctaccccacgagagaatttctcgccaggggtagaaaggataaatacaccaaggcgtgcagacactgcaaggcggacaacgaaaccagtgcccacatcatcggcaactgcccgataacgcaggacgcgagaatcaagaggcacaattacatctgtaaggtgctgtcagaggaggcgaagaagaaggactgggtagtgtttcaggaaccgcacctaagggataccaacaaggaactgtacaaaccagacctgatattcgtgaaagacgcccgtgcattcgtcgtggacgtgacggtacgatacgaagccagcaaaacatcgctggaggaggccgccgcggagaaagtgaacaagtacaaacacctcactgaagagatacgagaactgaccaacgcaaaggacgttgtgtttatgggctttcccctaggagcgctggggaaatggtaccatgggaacttagaactgttgggtgttctcggcctttccaaaacaaggcaggagaaggctgcccggactctatcctccattgcgctcacatcatctgttgacattgtacatatgtttgctagtagatctaggagctgtaatgtagtatag

SEQ ID NO: 31017 - DNA, 3786 bp, Geranoaetus albicaudatus
  source 1..3786: mol_type = genomic DNA
atgggtcggccgatgcgaatttccttcgtgtcggtggccacacaaacaagtcctttggacttgcgtgacaatgtggtctcctgttccatccaagaccacaaaactgggggattgctggaagggagatttgaaataaggggattggagtttgtgaactctgatctggagggtctaaaatgccagcaatctcccaccctgactgacctcctggctgtgcttcctgaggtgtatgaggtacctaactcttttagtctcggggacaagaacacctgtccgactccggtggaggacgagaacgaagaggaggagccctcgcctctcggggccgtggctgggacttctccattgccatcgactccggtctcacgatcccgtgacgatctcccagcagagagcactcctgtggtgaagatcccggacaagaatacatcatgtccgtgttgtggtaatgtgaccggtaaactgtcgggtttaattgaacatctgaaaagagcacatgggaagaaaaagatcttattccaatgtgctcggtgtgggagaactgatgtcaaacaccatagtattgcttgtcattttcctaagtgtaaggggcctgtggaagcctctcccgagaggagttggaagtgtgaggtctgtgagaaaacatttgatacaaaaatcggcctggggcagcataagcgcttggtccacccagtcacaagaaatctcgagcggattaccgctgctcgccctaagacaggtactatgagaggggcacatcgtcggtgctggaccgaggatgagatggaattattgagaaagttggataaacaatatgaggggcagaaaaacatcaataagttgattgcggagcatattccgaccaagacaacaaaacagataagtgataaaagacgggaccttcgtaagagcccggtaaaaaagggaaaagatcagggtcagacaaaacatctagaactagaaggggaacacctcgtggaaggggaacatctcgtgtgcattggatcggagatggaggggggactgaggtcccgataccgaaagacagtttctgagtgggtaacagctggaaaattgtccattctccatggaatgtttgagcaggtgatcgaaggagaagaagatccagcactagttgctgataaggcaatgaaagactgtttcacgtgccttgcctctaagtccctggagttgaaaaccagccagggtcgaccgcgtcaggtggcccaaactgctcgaccttcggaaccaccaaaggggtggatgaagaagagagctgtgaaacgggggcaatttctacgcttccagcggctgttctacctggatagggggaaactggccggtattatcctggatgacgtggaatccctgaagtgtgctatcccacaagacgagatacacaacgtgttcaagtcgagatgggagtcaccgggaacattcaagggcctgggtgcgttcagatccaagggcctggcggacaactcggcattcgaagccatgatcacggcaaaagaaatctctaaaaacatccaagagatgaacaagaacagtgcaccaggaccagacagactaagtctgcgggatatcatgaagatagacccccattgtgtccagctaatggaactattcaatctatggctggtgactggcaccgtaccggacgtggtgaaagaatgtcggactgtattaatatcgaaatcatctctgccggagcgccaaatggacattaataactggcgtccaattaccatcggatcgattatcttgaggctgttctcaaggatcctgacggcaaggctggcaaaggcatgccctattaactcccgacaaaagggctttattagatcagcgggatgtgctgaaaatttgaaactgttacagctcttgattaagagtgcaaaaaaggaacatcgacccttgggcgttgtctttattgacctggctaaagccttcgacacagtgagtcaccaccatcttatggcagtgctgaaacaaaagggtgtggaccatcacattatcaccctgattacgaacatgtatcaaaacaatagaactcgcattactgtgaagaatgagcactcggatcccatcgggattcaaattggtgttaaacaaggagatccaatgtcacctttattgtttaacttatctgtggaccccctattgtgtaagttagaggaagaagggagtggataccatcatgactctaagggtgtaacatctatggcttttgcagatgatttggtattgttaagtgggtcgtgggaaggaatgcagagtaatattaaaatcctggaggccttttgtgagctgactggcctcaggacgcagggggagaaatgccatggcttttacatacaacctactaaggactcgtatactatcaatgattgtcctccatggcagattaacggcaccccattaaatatgattgaacctggtagctcggagaagtacttgggactgagaatagacccatggactggaatatcgaaacccgagctactcaggaaaataagagattggttacaacggattggagaagcaccactgaaaccgtttcagaaagttgacatcttgaagggatataccatcccgcgactgatttacttagcagaccaagccgatgtaaaagcaacgtacctagaagaacttgacctgacgattcgaactacggtcaaggagtggctacatctacctcctagtacctgcgatgccatcctgtattccagcacacgtgacggaggattaggcatcgctagactctcgggcttgatccctagtatacaagctcgaaggctgcacagaattgcgcaatcttcggacgatgtgataagatcaatagtgaaacaagaggggatcgaaaaagactttgaaaaattgtggttaacagctgggggcgatagaaataaaataccatctatttgggacccgagtgcgattagggtaacatctgaggaattgggcgaggatgaatttgcttccgagtgggaaataccaactcccaaaaccatctttcctaaaccttgtgactggcgtaaacaggaatttattaattggaccaagttacagtcccagggccgtggtattgccaactttgagaaggataaaatcagtaataattggctcgaacgatatagaggcattcctcaccgaaaactcctcacggcattacaattgagagctaacgtgtaccccactagggaattcctggcaagggggagacaggagtcgcatataaaatcttgtcgacactgtcaagcggaaaatgaatcaagcgctcatatcattgggtactgccccgcggtgcaagacgccagaattaaaagacacaaccaattgtgtgatttattgataactgaagtaaaaaagaaggattggatcgtattccaagagcccatactaaaagatgaacaaaatgagatctacaagcctgatctcgtattcgtaaaaggggaccaggcgatggttattgatgtaacaattcgatacgagagtaaactgtcatcactggcggacgcggcggcagaaaaagtaaagaaatattgccatcttaaaaatcaaattcaagaattgacgaatgccaaaaatatcaaatttaagggattccctgtgggcgcacgaggtaaatggtattctggcaattacgaagtgttgaaagcattaggaatctcaaactcccgacaagataaaattgcgcgatgtatgtcaaggaaagctttatttacttctgtcgatatcgtacatatgtttgtgagtcattctagatctattgtaagaacttga

SEQ ID NO: 31018 - DNA, 3783 bp, Harpyopsis novaeguineae
  source 1..3783: mol_type = genomic DNA
atgggtcggccgatgcgaatgtctttcgtatcggtggccacacaaacaagtcctttggacttgcgtgacaacgtggtctcttgttccaccaaagaccacgggggattgctggaggtaagatttgaaataaggggattggagtttgttaactctgatttggtgggtccggaaggtcagcaatcctccaccctgattgaccacctggctttacttcctgaggtgtatgaggtatctaactctttaagtctcagggacaagaacatctgtccaactccggtggagagcgagaacgaagaggaggaggagtcctcacctctcggggctacggccaggatctctccattgccatcgactccggtctcgcagcctcgtgacgatctcccaacggagggtactcccgtggtgaagatcccggacaagaatacaccatgtccatgttgcggtaatgtgaccggtaaactgtcgggtttaattgaacatctgaaaagagcacacgggaagaaaaagatcttattccaatgtgctcggtgtgggagaactgatgtaagacaccatagtattgcctgtcattttcctaagtgcaaggggcttgtggaagcctctcccgagaggggttggaagtgtgaggtctgtgagaaaacatttgatactaaaatcggcctggggcagcataagcgcttggtccatccagtcacaaggaatcttgagcggattaccgctgcacgccctaaggcaggtactatgagaggggcacatcgtcggtgctggaccgaggatgagatagaattattgagaaagttggataaacaatatgaggggcagaaaaacatcaataagttgattgcggaacatattccgactaagacgacaaagcagataagcgataagagacgggaccttcataagggcccggtgaagaagggaaaagatcaaggtcggaaggaacatctagaattggaagaggaacactttgcggaaggggaacatcttgtgtgcgttgggtcggagacggaggggggactgaggtcccgttaccggaaaacaatttctgagtgggtaacatctggaaaactgtccattctccatgaaatgtttgagcaggtgatcgaaggcgaaaaagatctaacaacagttgctgataaggcaatgaaagactgctttgcatgccttgcctctaagtcctctgagttgaaagcgggccagggtcgaccgcgtcaggtggcccagactgctcggccttcggaaccaccaaaggggtggatgaagaagagagctgtgaaacgggggcagttcctacggttccagcggctgttctacctggatagggggaaactggccggtattatcctggacgacgtggaatccctgaagtgcggtatcccacaagacgagatacacggagtgttcaagtcgagatgggagtcaccgggaacattcaagggcctgggtgcgttcagatccaggggccaggcggacaactcggcattcgaagccatgatcacggcaaaagaaatctctaaaaacatcaaagagatgaataagaacagcgcgccaggaccagacagactaagtctgcgggatatcattaagatagacccccattttgcccagttaatggaagtattcaatctatggttggtgactggcgttgtaccggacgtggtgaaagagtgtcggactgtgttaatatcgaagtcatctctgccggagcgccaaatggacatcaataactggcgaccaattaccatcggatcgattatcttgaggttattctcaaggatcttgacggcaagactggcaaaggcatgccctattaatccgcgacaaaagggctttattagatcagcgggatgtgcagaaaatctgaagctactacaactattgattaagaacgcaaaaaaggaacatcgacccttgggcgttgtctttattgacctggctaaagccttcgacacagtcagtcattatcatcttattgcagtgcttaagcaaaagggtgtggaccatcacattatcaccctgattacgaacatgtatcaaaacatcaaaactcgcattgccatgaagaatgaacagtcggatcccatcgggattcaaattggggttaagcaaggcgacccaatgtcacctttattatttaacttatctgtggaccccctgttgtgtaagttagaggatgaaggcaatggataccatcacggttcaaaatgtgtaacatctatggcttttgcagacgacttggtgttgttaagtggatcatgggaaggaatgcaaagtaacatcaaaatcctcgaggccttctgccatcttactggcctcaggactcagggggagaaatgccatggtttttatatacaacctactaaggactcgtatacgatcaatgactgtcctccatggcaaattaacggtaccccacttaatatgattgaacccggtagttcggaaaaatacctgggactgagaatagacccatggactggaatatctaaacccgaactactaacgaaaataagagattggttacaacggattggagaagcgccactgaaaccatttcagaaagttgacatcttgaagggatatactatcccgcgactgatttacttagcagaccaagctgatgtaaaagcaacgtacttggaagaacttgacctgacgattcgaactacggtcaaggagtggttacatctacctcctagtacctgcgatgccatactgtattccagcacacgcgatggaggtttaggcatcactagactctcgggtctgatccccagtatacaagctcgaaggctacacaggattgcgcaatcttcggacgatgtcataagatcaatagtgagacaagaggggatcgaaaaagagtttgaaaaactgtggttaacagctggaggtgataaaaacaaaataccatctatttgggacccgagtgcgatcagggtaacatctgaggaattgggcgatgatgaacttgtttcagaatgggaagtaccagctcccaaaaccatctttcctaaaccttgtgactggcgtaaacaggaatttataaattggaccaagttacagtcccagggccgtggtattgccaactttgagaaggataaaatcagtaacaattggctcgatcgatatagaggcattcctcaccgaaaactcctcacggcactacaattgagagctaacgtgtaccccactagggaattcctggcaagggggagacaggagtcgcaaataaaatcttgtcgacactgtcaagcagaaaatgaatcaagtgctcatattattgggtactgccccgcggtgcaagacgccagaattaagagacacaaccaactgtgtgatttacttataactgaagttaaaaggaaggattggattgtattccaagagcctatactaaaggatgaacaaaatgaaatctacaagcctgatcttgtatttgtaaaaggagaccaggcgatagttattgatgtaacaattcgatacgaaagcaaactgtcatcattggcggacgcggcggcagaaaaagtaaagaaatactgccatcttaaaagtcaaatccaggaattgacgaatgctaaaaatattaaatttaagggattccctgtgggagcacgaggtaaatggtactttggcaattacgaagtgttgaaagcattaggaatctcaaattcccgacaagacaaaattgcgagatgcatgtcaagaaaagctttatttacttctgttgatattgtgcatatgtttgcaagtcattccaggtctattgtaagaacttaa

SEQ ID NO: 31019 - DNA, 3720 bp, Limnodromus scolopaceus
  source 1..3720: mol_type = genomic DNA
atgggttggtctgggcggatttggttcgtcacagttgccacccagacaaaatactcggattgggcatttacggttcattccatcacgaaccctgagctggcaggggacgggattgcagatttgagaggatgcgaatttggaaatgtggagaagggatattatgtggggcattcccctccccgatccagccttctggctactttaccggaggtatatgaaactccgagggtgatgggcaaagtcaccagcccgagttctgtgctgaccgaacatgagggagatagaacatcttctcccccaagaacaccacctcctattcttgagaccggggcagaccttccacaggagggcacacctgtggtaaaggtcccggatgataatccagcgtgtccatgctgcggtaatcgaataggaaggatttcggggcttatcgatcacttaaagagaacccatggaaagaaaaagatcctctttcaatgtgccaaatgtgggagaacaaatctgaaacatcaaagtatcgcttgtcacgttccaaagtgcaaaggcgccaaggggaccagcccattaaggggctgggcctgcgaggaatgcaatagaacatttgggactaaaattggcttaagtcagcataagcggcttgctcacccagttactaggaatatagagcgaataacagcttcccgcccgaaagaggaaagtgcacgaggtgcacaccgtcggtgttggtctgaagaggaagtgaagttgctcaagaagttggaaaaacagtatgaagggaataagaatataaacaaactaattgcagaacaccttccatcaaaaacagcaaagcagataagtgacaaaagaaggggactgataaaaagtccatcaaagaaaaatgggaaagatctgacgttgcgggaacaactcacggaggaaggagaacatctaattgagagtggctcccaagaaggtggggaactacggtcccaataccgtaagtcgattgcagaagggataagatctcagaaaataacgtcactcaggaaaatctttgagagagtgattgaagggaaagaagatctcccatccatagtcgatgaagctgcccaggatcactatgcatgcctgaaaagagatctcactgaaggggaaggtcgacaaattcaaaagatccgagagatccgcaggacccactcacaaaaaccatcaaaacaatggacaataaaaagggccagaaaacgagggcagttcctacggttccagcggctgttctacttggatagagggaaattggccggtataatcctggacgacgtggaatccctcaaatgtggtattccacttgacgtggtgcatgaagtattcaagtcaagatgggaatcacccggaacattcaagggcctgggtacttttaagaccattggtcaggcagacaattctgctttccaagctatgattaccatgaatgagattaagaaaaacatccgagaaatgaataaaaatgcggctccagggccggatgggatttccttgcgggacctcatgaaaactgatccccagtgtgcgaaattaatggaattatttaatttgtggttgttaaccgggtatataccggatggggttaaaaattgtagaacaatattgataccaaaatcaactgtaccagaaaagttaaatgatgtgaataattggagacctataacgattggctcgattatattgagactattttcaaaaatattaacggcacgattaactaaggcatgccctattaacatacgacagaggggttttataaagtcatctggttgttctgaaaatctgaaattattacaaactataattcaatatgcaaaaagagaacaccagccccttggggtggtctttgtcgacctggctaaagcatttgatacggtgagccactctcacatactgtcggtattaaaacaaaagggtgtggatgaacatataataaaactaattgaaaactcgtattataacatcaaaacctatattgatttgaaaaatgaaaaatctgactctattggaattcgaattggcgtaaaacaaggcgatccaatgtctccaattttgtttaacttatctgtcgatcctctattatgtaaacttgaagaaatgggtaatggatttcaatgtcatggacaaaatgtaacagcactggccttcgccgacgatttagtattactaagtgggtcctgggaggatatgcaaaataatataacaattgtagagaccttttgtgagctcactggtctcaagatgcagggggaaaagtgccacggcttttatatcaagccaacaaaagattcctatacgatcaatgactgtcccgtgtggactatcaatgacaccccccttaatatgattgaaccaggtagttctgagaaatacttgggtctttatgtcgacccgtggataggaatatctaaaccagaactactggagaaagttgacagatggcttgtgaaagtgggcaaggcaccattaaaaccttttcagaaagtcgacatcttgaaaggatacctgatcccgagagtaatatacctcgcggatcaagcaaatttaaaaccaacatatttagaatccattgacttggctatacgaactggagtcaaggaatggttgcacctaccagcgtgcacgtgtgactccatcctttattcgaatactcaggatggagggttaggaatcagcagattggcagcactgattccgagtgtgcaggttcggagactgcacagaattgcccaaacctctgacgaagttttaaaaactatcgtcaaaagagaaggaatagaaagagaatttgagaaattatggttgatggccggtggtgataaggaaaggataccatctatatgggacccaaaaactgttatgataatatcggaaacgggcggtgaccaaatattgtcggaatgggagattcccaatccaaaactaatttatccaaaaccctgtaactggagaaaaagggaatttaataattggactaaattactgatgcaaggccgaggtattgtaaattttgaaaaagataaaataagtaataattggttaatacactataggggcattcctcaaaggaaattaattacagcattacaattacgggcgaatatatacccgacgagggaatttttagctagaggacggtcggaaacttatattaaatcctgccgtcactgtcaggccgataatgagacttgcgcacatataattggctactgtccatctgtacaagatgcgagaattaaaagacataatcaaatctgtcatatattggcagaagaagctaagagaaaagattggttggtatatcaagaaccattattaagagatcaacaaaatgaattatataaaccggatttaatttttgttaaagggaatcgagcaatagtaacggatataacaataagatatgaaacaactattaaaacgttggaagaggctgccttagaaaaagcaaagaaatatgtacatctagaatcgcaagtccaggatctgacaaatacatctgttataaattttacaggctttcctttgggatctcgtggcaaatggtaccaaggtaacaacaaaatactaaatgaactgggtctctccaactcccgacaggagaaggtcgccagacgattatcaaactatgctttattcagctcggtggatatcattcacatgtttgcgagtaaagcgagaacggaggtaagatga

SEQ ID NO: 31020 - DNA, 3780 bp, Melierax canorus
  source 1..3780: mol_type = genomic DNA
atgggtcggccgacgcgaatttctttcgtgtcggtggccacacaaacaagtcctttggacttgcgtgacaatttggtctcttgttccaccaaagaccatgggggattgctggaagtaagatttgaaataaggggattggagtttgttaactctgatctggtgggtccaaaaggccagcaatctcccaccctgactgactacctggctttacttcctgaggtgtatgagatatctaactctttgagtctcagggacgagaacacctgtccaactccggtggagatcgagaacgaagaggaggagtcctcacctctcggggctacggccaggacctctccattgccatcgactccggtctcgcgatcccgtgacgatctcccgacggagagtactcctgtggtgaagatcccggacaggaatacatcatgtccgtgttgcggtaatgtgaccggtaaattgtcgggtttaattgaacatctgaaaagagcacatgggaagaaaaagatcttattccaatgcgctcggtgtgggagaactgatgtaagacaccatagtattgcctgtcattttcctaaatgtaaggggcctgtggaagcctctcccgagaggagttggaagtgtgaggtctgtgagaaaacatttgaaacaaaaatcggcctggggcagcataagcgcttggtccatccagtcacaagaaatctcgagcggattgccactacacgccccaaggcaggtacaatgaggggggcacatcgtcggtgctggaccgaggatgagattgaactattgaggaagttggataaacaatatgaggggcagaaaaacatcaacaagttgattgcggagcatattccgaccaagacaacgaagcagataagcgataaaagacgggaccttcataagagcccggtgaagaagggaaaagaccatgggcggaagaaacatctagaattggaaggggaacaccttgccgaaggagaacatctcgtgtgcattggatcggagttggaggagggactgcggtcccgataccggaaaacaatcgctgagtgggttacatctggaaaattgtccattctccatggaatgtttgagcaggtgatcgaaggggaagaagatccagcaatagttgctgacagggcaatgaaagactgtttcgcatgccttgcctctaagtccgtcgagttgaaagctggccagggtcgaccgtgccagagggcccaaactgctcggccttcggaaccaccaaaggggtggatgaagaagagagctgtgaaacgggggcggttcctacggttccagcggctgttctacctggatagggggaaactggccggtattatcctggacgacgtggaatccctgaagtgtggtatcccacaagacgagatacacgacgtgttcaagtcgagatgggaatcaccgggaacattcaagggcctgggtgcgttccggtccaagggccaggcggacaactcggcattcgaagccatgatcacggcaagagaaatctctaagaacatcacagagatgaataagaacagtgcgccaggaccggacagactaagtctgcgggatatcattaagatagacccccattgtgtccagttaatggaagtattcaatctatggctggtgactggcatcgtaccggacgtggtgaaagaatgtcggactgtgttaatatcaaagtcatctctgccggagcgccaaatggacatcaataactggcgaccaattaccatcggatcgatcatcttgaggctgttctcaaggatcctgacggcaaggctggcgaaggcatgccctattaacccacgacaaaagggctttattagatcagcgggatgtgcggaaaacctgaagctgttacaactattgataaagaatgcaaaaaaggaacatcgacccttgggcgttgtctttattgacctggccaaagccttcgacacagtaagtcaccatcacctgattgcagtgcttaagcaaaagggtgtggaccatcacattatcaccctgatttcaaacatgtatcaaaataccagaactcgcattaccatgaagaatgaacagtcggatcccattgggattcaaattggtgttaaacaaggcgatccaatgtcacctttactatttaacttatctgtggaccctctgttgtgtaagttagaggaagaagggaatgggtaccatcacggctcgaagtgtgtaacatctatggcttttgcagacgatctggtgttgctaagtggatcatgggaaggaatgcaaagtaatattaaaatcctagaggccttttgcgatctgaccggcctcaggactcaaggggagaaatgccatggcttttatatacaacctactaaggactcgtataccatcaatgactgtcccccatggcagattaacgataccccactaaatatgatcgaacccggtagttcggaaaaatacctgggactgagaatagacccatggactggaatatcgaaacccgaactactcatgaaaataagagattggctacaacggattggagaagcgccactgaaaccgtttcagaaagttgacatcttgaagggatatactatcccgcgactgatttacttagcagaccaggctgatgtaaaagcaatgtacttagaagaacttgacctggcaattcgaactacggtcaaggagtggttacatctacctcctagtacctgcgatgccatcctgtattccagcacacgcgatggaggcctaggcatcactagactctcgggtctgatccccagtatacaagctcgaaggctgcacaggattgcgcagtctccggacgatgtgataagatcaatagtgaaacaagaggggatcgataaagagtttgaaaaattgtggttgatagctggaggtgataaaagtaaaataccatctatttgggacccgagtgcgattagggtaacatctgaagaattgggcgaggaggaacttgtttcagaatgggaaataccaactcccaaaaccatctttcctaaaccttgtgactggcgtaaacaggaatttaaaaactggaccaagctacagtcccagggccgtggtattgccaactttgagaaggacaaaatcagtaataattggctcgaacgatacagaggcattcctcaccgaaaactcctcacggcactacaattgagagctaacgtgtaccccactagggaattcctggcaagggggagacaggagtcgcatataaaatcctgtcgacactgtcaagcagaaaacgaatcaagcgctcatataattgggtactgccccgcagtgcaagatgccagaattaaaagacacaaccaattgtgtgatttacttacagttgaagttaaaaggaaggattggatcgtatttcatgagcccatactaaaagatgaacaaaatgagatttacaagcctgatcttgtatttgtaaaaggagaccaggcgatagttattgatgtaacaattcggtatgaaagtaaattgtcatcattggcagacgcggcggcagaaaaagttaaaaaatattgccatctcaaaagtcaaattcaggaattgacgaatgctaaaaatattacatttaagggattccctgtgggcgcacgaggtaaatggtactctggcaattacgaagtgttgaaagcattaggaatctcaaactcccgacaagacaaaatagcacgatgtatgtcaagaaaagctttatttacctctgttgatatcatacatatgtttgtgagtcattcgagatctattgtaagaacctaa

SEQ ID NO: 31021 - DNA, 3732 bp, Myiozetetes cayanensis
  source 1..3732: mol_type = genomic DNA
atggttaggtccatgaaattgctgcacatatcggcagctacacagaccagtccttatgactgggtggaaacccccgccaagaaattagcctacttggcaggggaggatttggaactgcaggatttagagttttttaattcaagtatgtttaatgaattgggggggtaccatcctcctatccggtgggaaggtttggagaaatatcctgaggtgtatgaagttcctttttcagatcctgactcaggagagatcacccgtgaacccccggaggaaccccagcaggacatcagggaagagagccacccctcgttaacacctgcttcgcctatccagagggaaattcctgaccagtcacctgagaaaacacccgtggtgaaggtccctgacaccaacccaccgtgtcctgtttgcaacgaccggatagctggagtaccggggctggtagaccatcttaagagggttcacgggaaaagaaaagtaaagtttcaatgtgcaaaatgtggaaaggaaaatgtaaaatgtcatagtattgcttgtcacttccctcactgtacaggacctgcagaaactgctgcggctgggggatggacctgtgaggtatgcgggaggagtttcagatctaaaattggcctgggacaacacaaaagattggcacaccctgccgaaaggaacaaagaaaggattgctgcctcccacccaaaaactgcatctcagcgaggagcccaccgccggtgctggactaaagaagaggagctgctgataaggctgatggatcagtacaaaggtaaaaagaacataaataaactgattgctgaacacattccttccaaaaccacaaagcagattagtgataagaggcggttgctagagcctgggaaaaaactcggtgggaaagaactggacttaaattcccagggagaggataatggggaacagctggctggcgatgactcatcggggccggggctcctgagggctcattatctcggaactgtcagggactggttatcagggcagaaacttcacacctttcaaggggcattcaggaacatgattgatggactgcaggagccgctgtcgattgtgaatgactccaccagggactgctttgaatgcctgggtgtgagctaccagatcaataagccatctaattccaaactgcaacagcagaaaaagcagaattcccgacccgggaaaccggccaaaaactggatgaaaaagagagctataaagagaggactatttttacgtttccagcgattatttcatctggacagggggaagttagcacggatcatcctggacgacttggactccatgaggtgcgagataccactccaggacattcactctgtgttccgaaccaggtgggaaacacccgggaagtttaatggccttgggggatttatatcaaaaggacaggctgataacagcgcctttcaagccatgatcacagacagggaaatctccaaaaacatcacggagatgagtaagaactctgccccaggaccggatgggattacactgagggacctgaggaatatggaccccaagttctcccagacggctgagatctttaatttatggttaacatcggggatgattccagacatgatgagaggctgccggactgtgttaatacctaaatcgagcaagcccgagcgcctgaaggacattaataactggtgccctattacaatcgtatccatcatcctgaggctgttttccaggattctgactgctcgactgtctaaggcatgccccatcaacccaaggcagagaggatttataagagctgctggctgctctgagaacttgaaactgttacaacttttaattcgcaatgcgaaaagggaacacagagagattggagtggtgttcgtggacattgcaaaggcttttgacaccgtaagccaccagcacatcctcatgggactgaggcaaaaaggagtggatccccacatcgtcggcctcatacagaatatgtatgaggacatctacacccagatcgatacaaaggatggtaaaaccgaccagatcaagatgctggtcggggtaaaacaaggagacccgatgtcacctctcctcttcaacctggcaatagaccccctgctctgtaagctggaagaatatggaaacggattccaacagggaaagaacaccgtcacagcgatggcctttgctgatgacctggtgctactaagcggttcctgggaagggatgaacactaacatcaagatcctggagaccttctgtgaacataccggtctccggacccaaggggaaaagtgtcacggcttctacatcaagccaggagctaagaactcctataccatcaatgattgtccggcatggactgtgaatggcactcccctcaacgtgatcgaccctggcagttctgagaaatatttgggccttcaggtagacccttggactggtatagcaaagccggaattatcggcgatggtagaacattggctgcaacgcctcgagagggcaccgctgaaaccactccagaaagtggacattttaaaaacatatgccatcccaaaaataatttatttagcagatcacacaggtacaaaaactacatttctcgagtctctggatcttcagattcgtacaactgtcaaagaatggttacaccttccgccgtgcacctgcgatgccgtcctgtattccagcgtgaaggacgggggcctgggcattaccagattggctggactgattccgagtgtgcaggcccagagattgcatagactcgctcaatcttcggacgagaccatcagggcaattcttaaagaagaacaaattgaaatggaatatgaaaaactgtgggttaaagctggaggtgataaagatataatgccatcaatctgggagcccggaccggcaccattaccacccgaacagagggacgaaacaacaccatcggagtgggaggtaagcgcacccaaaattaaatacccgagaccctgtaattggcgaaaaattgaatttaataaatggaccaaacttacatcccagggccggggggttgagaactttgaagcagataaaatcagtaacttttggattgagcattacagaggcatacctcacaggaaactcctcacagcccttcaattaagagccaacgtttaccccacaaaggaattcctggcaaggggtaggcgggataaatgcagcactttctgcaggcactgccgagcaccaaacgagtctctctcccacatcatcgggacctgcccaatcgtgcaagatgcaaggattaagagacacaattacatctgtggcatgctatctgaacaagcgaaaaaggccgattgggtggtgtttcaggaaccaaatctgcgagatgacaataatgaactttacaagccggaccttatatttgttaaggatacacaggcatacgtggtggacgttacaatcaggtacgaacaaaatttaatgactctagaaacggcggcgagagagaaagtagagaagtatcagcatctccaaaagcaggttcaggacttgacgaacgctgcaaaggttttctttgttggttttccccttgggtcgcgggggaaatggtttaataagaactatgaactgttgggtgccctgggcctctctaaatccagacaagagaggacagccagggcgttggcgtccagagcgctcctaacttctgtagatattgtacatatgtttgcaagcaggagtcgaactgcagtagtttaa

SEQ ID NO: 31022 - DNA, 3762 bp, Otis tarda
  source 1..3762: mol_type = genomic DNA
atgggccggccgatacgagtggccttcgtatcggtggcaacacagacaagtcccttggacttgagagacgatgtggtcattaaatccatcatcgaccacagggaagtggtgggagaggaaattgaatatagaggactggagtttataaactcacagattgttggggtgatggcccaccctcccactccgattgagactttggccatgttaccagatgtgtacgaggtccctgatgtgggtcctaggggcgctacaactagcccccatttagtggaggtggagagtgaagaggaggaggtactctcacctccgggtgcaacggctcacccaattcagataccatcaacgcctatccttggtgctggaagcgagcatccaaccgagggcacaccggttgtgaaggttccggacaataatccaccttgtccctgctgcggcaaccggatgggaaaaatgtcgggactgattgaacatctccggagagcgcatgggaagagaaagatcctgttccagtgtgcccgatgtggacggaccaatgtgaaacatcatagtattgcctgccattttcctaagtgcaaaggggatattacatctcccccaaaaggtgattgggtctgtgaggaatgcgggaaggcatttgaaacgaaaatcggcctgggacaacataagcgtttggtccacccagctgcgaggaatattgagcggattatcgcctcccgccctaaggaaggtaccgctagagggttacaccgacaatgttggacggaagaggaggttgagttgttgaaaagattggataagcagtatgagggaagtaagaacatcaataaactgattgcggaacatattccatcaaaaaccgctaaacaaataagtgataaaagaaggggacttcataagagtccaataaagagaggtgggaaagaacaaggtgggaagaaacttttggaagaggaaggagaacatcttgtggagactggttcgcatgaaaacgggggtttaagatctcattatagaaggacggtttcggaatggataacatcagagaagttacccattcttcaggggacctttgagagcgtgttggaaggatcgggagagccatcaaccctggttgatgaagcggtggacgaatcctacgcacgcatgttcagaacatccatcgaattgaaagcttgccaagagagaaagcagcggatggcccgcagggctcgtccctcggaaccaccgaaagggtggatgaagaggagggccaagaaaagggggcaatttctacgattccagcggctgtttcacctagatagagggaaacttgccggtattatcctggatgatgtggaatccctgaagtgtgaaatcccactggatgaggtgcacagtgtgttcaagtcgagatgggaatcaccgggaacattcaagggcctgggtgctttcaggaccaacgtgcaggcggacaattccgcattcgaggccatgattacggcaaaagaaatctcaaagaacatcaaagagatgagtaagaacgcagcaccaggaccagatggactgactttaagagatcttattaagatggatccagagtgtgatcaattgatggaggtgtttaatttgtggctggtcactggctctataccgaacatggtgagagaatgccgaacagtattaatatctaagtcagccttgcctgagcgtcagagggacatcaataattggcgccctattactatcggttccatcctcttgagactattctcaaggattttaactgcgaggctgaccaaagcgtgccccattaatccaagacaaaggggatttattaaatctgctgggtgtgcagagaatttaaagctattacaactgttaattaagaacgcaaaaaagaaccatcgacccctggggatagtattcgttgacttagcaaaagcctttgacacggtgagccatcatcacatcattatggctcttattcaacggggcgtggacaatcatattattgccctaattaagaacttgtacagtaacatcagtactcgaatttacctgaagaatgagcagtctgatcccattgggatccacattggtgtaaagcaaggcgatccaatgtctccgatattatttaatttggccatagaccctctgctgtgtaagttggaaaaggaagggaatgggttccaacactgttcgaggacaataacagcattggcttttgcagacgacctggttctgctgagtggatcatgggagggtatggagagaaatattgaaattttagaggcattttgtcacctgactggcctcaaaacacaaggtgaaaagtgccatgggttttacatcaaaccgactaaggactcatatacgatcaatgactgtccagcttggattataaacggcacgccattgaatatgatcgaaccgggggaaactgagaaatatctgggtctacagattgatccatgggttggtatatctaagcccgaattacgtatgaaaattgaagattggctccaacggattgggagggctcctttaaagccgtttcagaaggttgacatcttgaaagggtataccattcctcgcttgatctatctggcagatcaggccgatgtgaaagtcacatatcttgaatcccttgacctgattatacgaactacggtcaaggagtggctacatttaccaactagcacttgcgacgccatactctactccaacactcgagatggcggcttggggattgtgagacttgtgggcctgatccctaatatccaggcccgaaggctgcaccgaatagcgcagtcatcggacgaactaattcgatctgtcgtccaagaagagggcatagagagagaatttgagaaactgtgggttacagctggaggaaaagtggacaaaattccatcgatatgggacccagggacggtcatgataatatcagagggagtgggcggtgaggaaccagcctcggaatgggagatagccgctccgaaagccatctttccgagaccttgtgactggaggaaacaagaatttgcgaactggaccaaactcttatcccagggccgtggtatttccaactttgaaaaagataaaatcagtaacagttggcttgaatattacaggggcattccccacagaaaactaatcacggcattacaactaagagcaaatgtctgccctacaagggaattcttagcgagaggcagacaggaattacaaattaaagcgtgccgacattgtctggcggaaaatgaatcatgttcccatattataggcttttgtcctgcggtacaggacgcaaggataaagcgtcataatcaattgtgcgaaacgttggcaaatgaagccaaaaagaaaaattggattatttttaatgaaccagtactcagaaatgagcaaaatgaattatacaaaccagatttaatatttgtcaaggaaaatcaggccatggtggtagatataacaataaggtatgaaagtaaaatcacttcccttgtagatgctgctaatgaaaaagttaaaaaatacgaacctttaaaaatacaaattcaagatttgactaattgtgagaatatcaaattttatggatttccaattggtgcacgcggaaaatggcatcaaggcaattatcaattattaactgaactgggactctcctcatcccgacgagagaaggtggctcgacaaatgtcaaagcgagcgttgtttacatctgtagatattatgcatatgtttatgagcaaatcgagaagcgtcgtgagatcataa

SEQ ID NO: 31023 - DNA, 3696 bp, Prinia subflava
  source 1..3696: mol_type = genomic DNA
atggtacagtctttggctttacggttggtatcaacgggcactcaaactgacccgttacatctgtgggtcagtagggctgaaattccacctcctcctgtggtgttgtgtgaggaaagttacgatctggtgacactggaatttgtgaattccaatgtgtgttttgaaggaggatttcatctgggtaacgccagggagtgcttggcccgcttccctgaaccttatgacatcttgccctctgggcttgttcgggaagagcgatttgagtgtgagataaatgaatcaggaggtccagtaacaccagtggttcctccggtgtgcagtggggctggatcacctccgaaaactccggtggtgtccgtcccggacaaaaatccatcctgtccgcgctgctccaccagattcactaggatgttggggctgattgaccatctaaagagagtccatggtcagagtaagatcttttttcggtgctctaagtgtggtaagcaacatcttaaataccacagtatcgcctgtcatgtcccccggtgtaaggggatggtcagtgtggttccaacgggcgaatggtcctgtgaggtgtgtcaccgcggttttgcaaccaaggtgggcctgggtcagcacaagagacttaaacatcctcttgtgcgaaatgaggaacggatcgcggcctctcgccccaaagagtcatctttgagaggagcccacaaaaaggtatggactgaagaggaggaggctctcctgaaacaactggtggagaggtttgctggtagtaggaacatcaatcagctgataatggagcatattccatctaaaacggccaagcagattagtgataaaagacgccttctgagtaaaagtccctcaaagaaacatctaggagaaggcgagaaagtcgggagtgaacatcctccccaatctgctaaagggccacaagagggacagttaaagctccattatattgggaccatcaggcggagactatcagctggcgggttcactagttgtaaggaggccttcttaaaaatcttagatgggcaagatccgcagaaagtggtgaatgaggaatatgagatgtttcgggatagcctgagtaggcttggccctaggactcccaggggtccgaggttgcgaaggctgcatggcccagacgcatccaaaataacagctaaatggatgcgtaaacgtgctgagaaacgtggaaaatatcttcgatatcagaggctgtttcaggtgcatagaggaaggttagcacgtgtcatattggatgacacggaagccctgcaatgccaaataccatctggcactgtccatagtgcttttaaggcaaggtgggagtcatcggtttgttttaagggtcttgaaacgttccctgtttacagggacgcggataacatcaagtttcaagacctgattacggagaaagagattggtaaaaacttggatgagatgaaaacaacctctgctcctgggccagatgggattactttgggtcacctttccaaattggacccgaagttctcccggttgactgagatcttcaacctctggctcgttaccggaacggtaccggatgcactccgggaatgccggacagttttgatacccaagtcctcccgggaggagcgtcttggtgatatcaataactggaggcctatcaccattgcatctgtggtgcttaggttgttctccaggatcgctaccgcgaggctgtcgcgggcatgtcccatcaaccccaggcagcgggggtttattagtgcgtctggctgttccgagaacctaaagctgttgcagcttatggttaagtgtgcgaagcaggagcggaaaaatctgggggttatgtttgtggacattgccaaggcttttgacaccgtgtgtcatggacacattctggcgggtctggctcagaggggggtcgacccccatattgtggggttggttggtgagatgtacaacaacatcaaaacgtacatcgtcaccaggaaagggagaacagacccaattaccatcagttctggtgtcaagcagggcgacccaatgtcaccagtgttgttcaacctggcacttgaccctcttttatgtaaacttgagacagagggcaaagggttccatcatggtgggtttaagattacggccatggccttcgccgacgatctggtactgctgagtgattcctgggaaggcatgtgctataacatcaagattctggagaccttttgtgagcttaccggtctccggactcagggggagaaatgccacggcttttacatcaagccgacaagggactcttataccatcaatgactgtccagtttggcaaattaatgggaccccccttaacatgatcgacccagggacctctgagaaatatctaggcgtccagatcgacccttgggttggcttcgctgactcaggcttatccgcgaaactggaagagtggcttgatcggattgggcaagcaccactcaaacctcttcagaagctggatatactcaggacctataccatcccgaggctgatatatctagcagaccataccgaggtaagatcggggctcctcgagtcccttgacttggccatcagaaggaaagtcaaggagtggctgcatctccctccaagtacatgtgatgccatcctgtattcgagatttaaagacggtgggctgggtatcatcaagttggcggcgctgattcctaacatccaggcgcgaagattgttcaagttggctcaatcttcggatgtggctcttgtctcatttctgaaaggggaacaactagagaggacttttgagaaactgtggttgagagctggggggactagagagtccatcccgccaatttgggagcccatccccatggacgaaggggttgcagagggagataaagccttatcggagtgggaggccccccgttcccgattccacgctccaagaccttgtgattggagaaagttggaatttaagagatggatacagctggtttcccagggtcacggtgttggtaactttgagaatgacaagatcagtaattggtggatggtacaataccgcggcattcctcacaggaagctaataacggcgctacaattaagagcaaatgtctacccgactcgtgagttcctggctaggggtaggcaagatgtctgtgtaagatcatgtagacactgtggcgcgcagttggaaacaaccgcccatatcatcggaacctgtccaatcactcaggaggccaggattaaacgtcacaattccatctgtgagactcttagcggtgaagctaagagggagggttggacagtgtttgaggaaccacacttgagggatgaacagaatgaattatttaaaccggatttgatctttgttaaaggtgaaaaggcacttgtggtggacgtgacagttagatacgagcacagcagctcatctctcaaagaggctgcggccgagaaggccaagaaatatcaacgccttctaccgcaaattcgagatcttacaaatgcggcggccgtccagtttgttggtttccccttgggagcgcgggggaagtggtatgagagaaacgctgagttgctgttggccctgggtctctctaaagcgaggctagggaggatagcccgggccctagcatccaaggcgctcctctcatccgttgatatcgttcatatttttacaagtaaggctcgtgctctgtaccatgaaataaattaa

SEQ ID NO: 31024 - DNA, 3981 bp, Serinus canaria
  source 1..3981: mol_type = genomic DNA
atggccccacggtctgacaggggcaacgggttcggagatgggccggccacccatcccgttcccgtcaatgaaattggccaagaaccgattgatcccgacccgttcctcggaggggagaactgtgggctgccgctacgcctgttcggtgtatcggtgggcactcagacttcccaagaggacttaacgcctataccaaccaaattggcagtaaatgaattggatgtactggtgaatttttcttttgaggtttatagatcagatctgaagggttatgttgggggggttcattttcctgttaatttggaggtactggaagggtttccggaggtgtatgaacatcttgaacctcaaccatgccagggggacaatttagatcctagtccccctgacgacggtgtacaggttgtgcttgggagggaggagggtaaaaaggagagggagggtgcacctgaggcgctgcctccagtgcaaaggggccacagcgaacaggtaccggatgacatcgtgaaggtaactgttcccgacaaaaatccaccttgtccctgctgtagtacccggctaaactcggtgttggccctgattgatcatcttaaggggtcgcacgggaaacggagggtgtgctttcggtgtgccaaatgcgggagggagaactttaaccatcacagtactgtttgtcattttgcgaagtgcaagggtccatcggaggaaaagcccccggtgggagagtggatttgtgaggtatgcggtagggattttacaactaaaataggtctgggacaacataaaagattggcgcatccaatggttagaaatcaggaacggatcgatgcttcccagccgaaagagacgtcaaatcgaggagcccacaaaaagtgctggacgaaggaggaggaggaacttctggctagattggaggtacagtttgagggacacaaaaacatcaataagcttatcgcggaacatattacaactaaaacaaataagcagattagtgacaaaaggagacaaatgaccaggaaggataaaggagagggtggagcagctgggaagctaggaccggacactgggaggggaaaccactcccaggcgaaggtcgggaacaatggacttggtgggaaccaactgccgggaggaccagctgctacaaaagataaggcaggatgtcatcttgataaggaggaaggtaaccggatagccattagccaacaaaagaaggggcggctgcagggtcgttatcacaaagagatcaagagacgcttagaggaaggggtaattaacacctttaccaaagcctttaaacagctattagagtgccaggaggtacagcctttgatcaataagacagcgcaggattgttttggcctcctggaatcagcgtgccacatacgaacggcactccgtgggaaaaacaaaaaggagacacaggaaaagccaacaggaggacagtgtttgaagtggatgaagaaaagagcggtcaaaaagggtaattaccttcgcttccagcggctttttcatctagacagggggaaattagcaaggataattttggatgacatagaatgcttgtcctgtgatatagcacccagtgaaatttattcggtgtttaaagccagatgggaaacacccggacagtttgctggccttgggaactttaaaagtaccgggaaggctgataacaaagccttcagtgacttaattacggctaaagaaattaaaaagaatgtgcaggaaatgagcaagggttcggcaccaggtccagatgggattgccattggggacatcaaagggatggatcccgggtattcccggaccgccgaactcttcaacctgtggttaacatctggtgagatcccggacatggtgagggggtgcaggactgtattaatccctaaatcgacgcagccggaacgcctaaaggacatcaataactggagacccatcacgatcggttccatcttgctgaggctgttctccaggattataacggcgaggatgacgaaggcgtgccccctcaacccaaggcaaagaggcttcatcagagcggcgggatgctctgaaaatttaaaactcctgcaaactataattcggactgctaaaagtgaacatagaccactgggtgttgtattcgtggacattgcaaaggcttttgacaccgtaagccatcagcacattttacatgttctacagcaacggggtgtcgatccccacattatcggactggtgagcaatatgtacaaggacatcagtacatttgtcaccacaaagaaggacacacatacggacaaaatccagatccgggtcggagtgaagcaaggtgacccgctgtcaccccttctgttcaacctggcgatggaccccctgttgtgcaagctggaagagagtggtaacggattccatcgaggaggacacacgattacagcgatggcattcgccgatgaccttgtcctgctgagcgactcctgggaaaatatggagaagaacatcgagatactggaggccttttgcgatctcaccggcctcaaaacacaggggcaaaagtgccacggcttttacatcaagcccacaaaggactcttacaccgtcaacaactgcgctgcatggaccatctacggcacacccctgaacatgataaaccccggagactcggagaaatacctcggcctgcagattgacccctggactggtatagcgagatccaatatctcgtcaaaattggactcctggcttgaacgcatcaatcaagccccactcaaacccctacagaaactcgacattctcaaaacatacaccatccctcggctgacctacatggtggaccattcggagatgaaagcaggggctctggaagcacttgacctgcaaattcgatcagcggtcaaggactggttgcacttaccatcgtgcacctgtgatgccatcttatacgtgagtacgaaggacggcgggctgggcgttactaaattggcaggtctgattcctagtatacaggctaggaggctacatcgaatcgctcagtcccctgacgagacgatgaaagcgttcctggacaaggagcagatggagaagcagtatgctaagctatgggttcaagctggagggaagagggagaagataccgtcaatttgggatgcactaccgacacctgtactgctcaccactagcgacactctttcggaatgggaagcaccgaaccccaaaagtaagtaccccagaccgtgtaattggcggaggaaagaatttgaaaaatggacaaaattacaatgtcagggcaggggaatccaaaattttaagggtgatgtgattagtaacaattggattcaaaattatagacgcatacctcacaggaaactcctcaccgcagtacaacttagagccaatgtataccccacaagggaatttctcgggcgggggaggggcgatgactgtgttaagttttgtaggcactgcgaggtggaccttgaaacctgcggccacatcatcagctattgcccggtgacgaaggaagccagaatcaaaaggcacaatcgcatctgcgagaggctgattgaggaggctgaaaagaaggactgggtggtgttcaaggaaccgcacataagggacgctgtgaaggagctattcaaaccggacctgatattcgtgaaggaggaccgggcacttgtcgtggatgtgacagtacggttcgaggcaactacaacatcgttggaggaggcggctattgagaaggtggacaagtacaagcgcctggaaaccgaagtacggagcctgaccaatgcaaaggacgttctttttatgggctttcccctaggagcgcgggggaagtggtaccaagggaactttaaacttttagatatgcttggcctctctgaatcaaggcaggtcactgttgcaaagactttatccacagacgcgctcatctcctctgtggacattgtacatatgtttgccagtaaggctaggaaaatgaatttagtgactgtttag

SEQ ID NO: 31025 - DNA, 3693 bp, Aphelocoma californica
  source 1..3693: mol_type = genomic DNA
atggtacagtcagtggctttgcggtacgtatctacagccacccaaactgacccattagacctctgggtcagagaagccaaaattccatcaccatctgtggtgatagaagaggaaagatttgatctggtatctttggagtttaataactccaaaattgcctttgaaattgggagccatctgggtaacaccgcagattgtttggccttgtttcctgaaccttatgaaaccttgcccgctgggctggtccaggaagaaacgattgggtgtgaaataagagaatcagaggagccaacaacacctaggactcctcccggggacaaaaggggcggaacaaatacgggaactcctgttatgtctgtcccggacaaaaatccatcatgtccaagatgtatgacccggtttacaaggatgctggggttaataaaccatctaaagacggcccatggctgcaataagatctggttcaggtgctctaaatgtggtaaacaaaatctgaaataccacagtatctcttgtcatgtcccccgatgcaaaggtgaaggatttgtggctcctacggggtgctgggtctgtgaggtatgctctagaggttttgccacgaaaattggactgggtcagcacaagaggttacaacatcctcttgtgcgcaatgtggaacggatagctgcctctcaccctaaagaaacatctttgcgaggggcccataagaaggtatggactgaggaggaggaggctctcctgaacgaattggtgataaagttcgccggtagcaggaacatcaatcagctaatagcggagcacataccatctaagacgccaaagcagatcagtgataaaagacgccttctaaagagtccctcaaagaaagttcaatctaaagaaggcggggctatagggagtcaagaacttccccgatctgctgagcagcaaagtgagggacgcttggtgctccactatcataacatcattaagctgaagctatcggcaggcgagttcaccatgtgtcgggaggcctttgaaaaatgtatacaggggcaagatccgcagttagtggtgaatgggatatatgaaaagtttcgggatagcctggagaggcttgaccacaaaaggtctaagccgcgaaggtctcgggggcctcgaggccaaaaagcatccggggcaacaactagatggatgcagaaaagggccgtcaagaaaggaaaatatctgagatatcagagactgtttcagatacatagagggaggttggcacgggttattctggataacacggaagccctgcagtgccaaataccatctggtattgtccacaaagcatataaagaaagatgggaaacatcggtttgttttaatggtcttgaatccttcccagtgtatagggaggctgataacaccatgtttcgagacctgatttcggagaaagagattggcaagaacctgaatgagatgtgtaaaacctccgctcctgggccagatgggattactctgggtcatcttatgaaaaaagaccctaagttttcccagttgaaagagatcttcaacctctggcttgccactggaactttacctgatgcgcttcgggactgccggacagttctgatacccaagtcatccaatgaggagagacttggtgatatcaataactggcggcctatcaccatagcctcagtggtgtttaggctgttttccaggatcgtgaatgcgagactggtacgtgcatgtcccattaaccctagacaacggggtttcatcagcgcgtcaggttgttccgagaaccttaagctgttgcagcttttggttaggaaggcaaaacaggagcatactagcttgggggtagtgtttgtggatattgccaaggcatttgataccgtgtgccaccagcatatattagctggtttggttaagaggggagtcgactcccatgtagtccatcttatcggtgagatgtacagaaatatcaaaacgtacatcgtcaccaagagtgggaaaacggaccccattaacatctgttccggtgtcaaacagggcgacccgatgtcacctctgttattcaacctggcgctagatcctctcttatgtaaactggaaacagaagggtgtggattctatcatggaggattcaagattacggctatggccttcgcagacgatctggtgcttctgagcaactcttgggaaggcatgcgtaataacatcgaaattttggagaccttttgtgaacttactggtctccgaactcaaggggagaaatgccacggcttctacatcaagccgactaaggacgcatataccatcaatgattgtcctgcgtggctaattggagggactcccctaaacatgatcgacccaggtagctcagagaaatatcttggcacacagatcgatccttggaccggttttgccgacccaggccttcctacgaaactggaggaatggcttcatcggatcggtgatgcaccacttaaacctcttcagaaagccgatatactcaggacttataccatccctaggctgatatatctggccgaccataccgatgttaagatcgggctccttgaatcccttgacctgatgataaaaaaatcggtcaaggagtggcttcatctcccaacttgtacgtgcgatgccatcttgtattccaggtttaaggacggagggctggggttcatcaaattggcggcgcttatacccagtatccaagcgcgaagattgcataagttagcacaatcttcggatgggactttggtttcgtttttgaaggaggaacatctagaagtgatgtatgagaaactgtgggttaaagctggaggtgtaagagagtccatcccccaaatttgggaccccatcccattgacggaagttgttggtgagggggatgaagccttgtctgagtgggaggcacctcgttccaagcttcgccttcctaggccatgtgattggaggaaggtggaatttaataaatggaaacatctggtcgcccagggccacggaattgataattttgagaacgataagatcagtaacgattggttggtgcattaccgtggtattcctcacagaaaactcataacggcattgcaattgagagcgaatgtctaccccactcgtgagtttttagcaaggggtagacacgatgtcagtgttcgatcttgcagacactgcggtgccgaatatgaatcagcatcccatgtcatcggaaaatgcccaattactcaggatgcccgaattaagaggcataattccatctgtgaaactcttagccgagaagctaagagggagaattggacggttttccaagagccgcatctgagggatgaagaaaatgaactatttaagccggatttgatctttgtgaaagatgctaaggcattcgtggtggacgtcacagtgagatacgagcacagcaattcttcattgaaagaggccgcggtggagaaggcgaaaaagtatcaacgccttctaccacagatttgtgacctcacaaatgtgacatccgtagagttcgccggtttccccttaggagcgcgggggaaatggtttgagaagaactctgaattgcttgaggccttgggtctctctaaaacgaggctagggagactagcccgggccctagcatccagagcgctcttctcttctgtagatattgtacatatgtttgcaagcaaagctagattgttagtaccttttaaataa

SEQ ID NO: 31026 - DNA, 4095 bp, Oenanthe melanoleuca
  source 1..4095: mol_type = genomic DNA
atgcctcccaccgcccaaggtggtcccattgagatgggtgagaattctggatctgattttggggggggggtctggtttagagcgccggtacgcctgtccagggtatcggtgggctcccagacctcccccagtgactgggttgacctgttgtcctggaatttaaatctatttccaggatctaaaacccagtgggttgacctgttgcctgtgcacggggtcgacctggtgtccaaaaatgaccgggtaaacctggccgctcgaaatttaccatccaaattgtcccccgattcggcagaaaatgaattggctttggtggcgaacttggagttctataggtcggacttgcaggagggtgttcatttttctgctaaccgggagggattgagcgggctgcccgaggtgtatgaacaactaacaccacaaccgtgtgcgggagatagtttacatgctaacctcccgcgagacgctaaactgtttgtgcttgagcaaaggtgcagcgaggagaaggagagcgaggaagcgccggagacatcacctccaacgcctgggaagcccggggggcagacacctgaggggaccgtgacggtgactgttccggacaaaaatccaccttgtccttgttgtggtacccgggtgaactctgtgttggccctaatcgaacatctaaaggggtcgcacgggagaaggagggtttgttttcggtgtgtgaaatgtggaaaggaaggttctaactatcacagtattgtttgtcattttcccaaatgcaggggtgcagagactgaagcggctccagctggggagtggatctgtgaggtatgcggaagagatttccaaactaaaatcggcctgggacaacataaaagacatgcacacccgtcagttaggaaccaagaaaggatcgttgcttcccacccgaaagaaacatctaaccgaggagctcacaaaagatgctggacaaaggaggaggaagagatgctgataagattagaggcgcagttcgagggccacaaaaacatcaataaactcatcgcggaacacattacaaccaaaacaaataagcagataagcgacaaaaggagattgctgcccaggaagccagttgaggaccttgaagaagaacctgctgtgagtactcgcaccaggagagcagctgcgggtctaagaaaggaacctggggtgagtcatcaaggccaggctgtagccgagaacaatggcccaggcaggagccgcctgccaggggagccagctgccggagaggaaacaatggacgagataaggcgccgccctgataagggtaagggccggaggggagccatcaagaagcaaaaggaggggcaactgcaggcccattaccaccggacactcggggaacggctatcagctgggacaattaacaccttcccccgggcattcaagcagttaattgagggtcaggaaatgcaagcaacgatcaaccagacagcgcaggactgcttcggatgcctggaagcgataagccagataagaacagcaacccgagataagaacaacaaaggggcccaggagaaacaaccaaagagaccttttcagaagtggatgaaggacagagcaattaggaagggtgattaccttcgcttccagcgattattccatctcgatagggggaaacttgctaaaattattttagacgatattgagacattgtcctgcgatatcgcacccagtgaaatttattcggtttttaagaacagatgggaaacacctggtaacttcactagccttggggaattccaaattaacgggaaagccgacaatagcgctttcagagacttaattacggccaaagaagtcgagaaaaatgtgcaggaaatgagcaagggctcagctcccggtccagatgggattactcttggggacatcaagaagatggatcccgagtactcccggacagcggagatcttcaatctgtggttaacatctggaaaaatcccggacacggtgaggggatgcaggactgttttgattcctaagtcgacagaacctgagcgtttaaaggacactaacaactggagacccatcacaatcggttccatcttgctgagactattctccaggattataacagctaggctgagcaaagcctgccccctcaacccaaggcaaagaggattcatcagagcggcgggatgctctgaaaacctgaaactcctgcagtctttaatgtggtccgccaaaaaagaacacaaaccactgggtgttgtattcgtggacattgccaaggcttttgacaccataagccaccagcacatcattcaagctttgcagcaaagggaagtggacccccacatcatcggcctggtgagcaatatgtacaaggacaccagtacatatatcaccgtgaagaaaaacacacgcacagacgaaatccatttccgggttggagtaaaacagggtgacccgatgtcaccccttttatttaatctggctatggaccccctgttgtgcaagctggaagaaagcggcaaagggtaccatcgaggagggagcagcatcacggcgatggcatttgcggacgatctggtcttgctgagtgactcctgggaaaatatgaaaactaacatcaagatattagagaccttttgcaatcttaccggtctcaaaacacagggagtaaagtgccacggctactacatcaagccgacaaaggactcttacaccgtcaatgactgcgctgcgtggaccatcaatggcacacccctgaaaatgattgaccccggagaaactgagaagtacctcggcctgcagattgacccctggactgggatagcaaaatccaatctctccacaaaactggaatattggcttcagcgaattgatcaagctccacttaaacccctgcagaaagttgatatcctcaaaacatacaccatccctcgactgacatacctggccgaccattcagacctgaaggctgggttcctggaaagcctcgaccaaaaaattagaacgacggtcaaggactggctgcacttaccttcgtgcacgtgcgatgccatcctgtactcgagcacgaaggacggtggtttgggcattgtcaaattggcgggactgatccccagcgtgcaggcccgaaggctgcatcgtatcgctcaatcttcggacgaaacgatgaaaatgttcctggagaaagatcaaatggaacaaacatataggaaattgtgggttcaagctggaggggacagggagaagatcccttcaatttgggatgcaccaccggtgagcgaaccagctgacagtgcagagacatattcggagtgggaagcaccgtccttgaaaactaaatttccaaaaccgtgcaattggaggaaaaatgaatttaagaattggactaaattagtgtcccagggccgtggaattacaaattttgaaggcgataaaattagcaaccattggctacaatattacagaagcatacctcacaggaagctcctcactgctttacaacttagagccaacgtataccccacgagagagttcttagctagggggagacaggataaatacatcaaggcatgcaggcactgcgatgcagctattgaaagctgcgcccacatcatcggcaactgcccagtaacgcaggacgcccggatcaagaggcacaattacatctgcgatgtgcttcttgaggaggcgaaaaagaaggactgggtggtgttcaaggaaccgcacataagggataccaccaaggaactgtacaagcctgacctgatattcgtgaaggacgcccgtgcacttgtggtggatgtgacagtacgatacgaagcagccaaaacatcgctggatgacgccgctgcagagaaggtgaacaagtacaagcatttagagaccgaggtacgaaacctcaccaacgcaaaggacgttgcttttatgggctttccccttggagcgcgggggaaatggcaccagaaaaactttgagctattgggagctctgggcctctccaagtcgaggcaggagaaaatcgcaaggactttatccacaacagcgctcatgtcatctgtggacattgtacatatgtttgccagtagggccagaaaattaggtaaccaggagtag

SEQ ID NO: 31027 - DNA, 4305 bp, Phylloscopus trochilus
  source 1..4305: mol_type = genomic DNA
atgtcaaaacctgaccctttaaacgtaaatatgtccactccattcttggggacacaaatgcgcctgctcagggtttcaactggaactcaaacatctatgtcagactgggcagactgggcacagaggctctgtggtacagctaccaggtctgcactgtgtaaggtggtcccggtgtccttactatccagacatcagacagaattactagctatgggccatgggagtcagatgcctctaaatgcaccccttaacaccccggacttaacagaaagtgaattggcttgtttggttttggactgggagttttacagaacagatttgtccgctagtagttttaaccttgttcaattttctgctaaccgagagagtttgagtgggctgcctgaggtgtatgaacagccgactccgtttcaacctgaaggggagaaaatctgccccccaagagactgtgaagcagttttggtcggggaaggggaggggagcagtgaggaggtcacaccagaaccatcgccccctgaaccagagacaacctccgtggcagcatctccaactctgcctgtaaccaacgtggaacagtcgtcggagagccccatcacagtaattgtgccggataaaaatccttcatgtccctgctgtggtattcgagcgagcggggtatcgggtttgattgagcatttgcgggaggttcacaggaggagggaggtttgctttcggtgttctaaatgtgagaaagaaaatactaattaccatagcattatttgtcattttcctaaatgcaagggtaaagaggaaacatctgcgccagccggggaatggtcctgtgaggtatgtggacgagattttaatactaaaattggcttgggacaacataaaagattggcacacccagctgttagaaatcaggaaagggtcgctgcttcccacccaaaagaaaattctaaacgaggagctcataaaaaatgttggactgaagaagaggaaaaattattaatagaattaatagctcagttcgaggggcatgcaaatattaataaattaattgcggaacatattacaaccaaaacagctaaacaaattagtgaaaaaaggagactgctctccaaaaaactaatggtagtggaggcagaatgtgaacctgggccaagtcatcggaccaggagagcagctgcagagataaggaagggagctgagatgaatcaccataatgaggatgctgctgaggacaatggagctgggaggggtcccctgaccaggagagcagctgcccggggggaaacaaaagaagagataagccagtttcctgataaggccaacgatcagcaggaggccagtagcagtgggaggggcccagtgaccaggagagcagctgcaggaaagaaaacaaaaaagagtattgatcaccctactgataaggccaacggccagcaggtagccatcagcactagaaggggttgtttgaatagaggagtgactgccggggtagaaacaatagagggctcgagtcacctccctgataaggacagtgacggacagggcacccccagccgggagaaggagggacaattacaagatcactatcaagaagtcatcggagcctggttatcagatgggaggatcaatacctttccagaggcattcaaagggttgttagggaaacgagagatacaggcaacgatcaatcagtcaatactggattgttttgggggcattgattcaaaaagccaggtgaacaaaatgactcgagataagaaagataaaaagccagggagacctccccagaagtggatgaaaaagagagccatcaaaagaggtagctatcttcgcttccaacgtcttttccatcttgataggggaaaattagccaagattgttttggacaatatcgaatgtttgacgtgcgatatcccacccagtgaaatttattccgtttttaaggccaggtgggaaacagcaggcaaatttaccagtcttggggactttaaatttactgaaaaggtggacaatagtgcattcagggatttaattacagctaaggaagtagaaaagaacatgcaagaaatgagcaaaggctcggctcctggtccagatggaattactctgagagacattcaaaaaatggatcctaagctctccaggaccacagagattttcaacctttggttggctgcaggcaaaattccggatggggtgagggaatgcaggactgtcttaattccaaaatcaacaaaaccagaacgcttaaaggacattaacaattggagaccaattacaatcggatccaccttgcttagattattttccaggattttaacagccagactaagcaaggcatgccccctcaacccaagacagaagggcttcattcaagcagccggatgctcagaaaacctgcaactcctgcaatccataatttggtcagcaaaacgggaacacaggcccctgggtgtcgtatttgtggacatcgcaaaggcttttgacacagtaagccacaagcacattctacacgttctgcagcggaggggagtggatcctcacatcatcggcctggtgagtgatatgtatgaaaacattcatacttctatcaccacgaagaaagcacgtacggatcgcatccagatccgagttggagttaaacagggcgacccgatgtctccccttctattcaatctggcaatggaccccctgctgtgcgaactggaaacgaacggcaggggacaccaccgcggcacaaattgcatcacagccatggcgtttgctgacgacctggtcctactgagtgactcctgggaggacatgaagagcaacatcaagatattggaggccttctgcgatctcaccggcctcaaaacgcagggagagaagtgccacggcttttacatcaagccgacgaaggactcgtacacggtcaacgactgtgctgcttggactataaacggcactcccctgaacatgattcttcccggtgagtccgagaaatacctgggcctgcagatagacccatggactggattggcaaaatcggacctctctacaaaactcgactcatggctcgagcaaatcgatagagttccactcaaaccgctgcagaaaattgaactcctgaaaacatacaccatccctcggttgacatacgtggctgaccattcggacttgaaagttagtttcctggagacattggatcagaagattcggacaatagttaaagattggctacacctgcctgcatgtacctgcgatgccatcctatactctagcacgaaggatggcggcctgggcatcactaaattagcaaagctgattcctagcgtacaggctaggagactacacagaatagcccaatcatcggacgaaaccatgaagcaatttctccacagggacaagatggaagcaatgtaccagaaactgtgggttcaagcgggaggagatagggagaaagttcctgcaatctgggaagctagacctacgatcgagtcacctaatttacaagaggtaggggtttcttctgagtgggaagcaccgactctgaaaaacaaatttcccaagccgtgcaattggagaaagatagaatttgaaaaatggaccaatttgatatctcagggacggggaatagggaatttcaagggggaccaaataagtaacaattggctgcaacactataggaacatacctcacaggaaactccttactgctgtacagctgagggccaatgtatatccaactagggaatttttagccaggggtaggcaggataaatacatcagaacgtgcagacattgcgacgcggccaacgaaacgtgcgcacatattattggcaattgccccataactcaggacgcgagaatcaagaggcacaactatatttgtcaagtgttgtcggagaaagcaatagggaaggactggatagtatataaagaaccgcacatcagggactccaacaaagaactttataaaccggacctgatatttgtgaaagacaaccgagcgtacgtcgtggatgtgaccgtgcgatacgaatcggacgagacctctttggagatggcggccacggagaaagtggacaagtacaaacacctgaccaaagagatacgaacgatcaccaacgcgaaagacattgtttttatgggctttcccctcggagctcgggggaaatggtaccaagggaactttgaacttttgaaagcccttggactctccaaatcggatcgagaaaagactgcccggtccttgtcatccatagcactcatgtcatctgtggacatcgtccacatatttgccagcaaatccaggacttgcactacactgtaa

SEQ ID NO: 31028 - DNA, 3546 bp, Geothlypis trichas
  source 1..3546: mol_type = genomic DNA
atggacaatatggtgcaatctctggctttgcattttatttcgatcgctactcaaactgacccattagatttacaggtcactgaggttgaagttccatctataccctctgtgcccagggaagagggattacaactggtgtgtttggagtttgtgaactccagaattgttaaagaaggtggtatacatcacgcagatgtgtgggaaggattggcacaattccctgaagcctatgagatctcccctatggggttggcccaggatgtgcccgagggtgtggtcggaggtactggaggcattgacgagcctaaaacgcctgaagctcctcccaggtctgacagcacaacggtgaagtcacctgttgtgtacgtcccggacaaacaaccatcttgtccacgatgtgagactcggtttacaaggatgttggggctgattgatcatcttaaaagggtgcacgggcagaaaaagatcattttcagatgctcgaaatgtggtaaacaaaatcttaaataccacagtatctcttgtcatgttccgcggtgtaaaggtgtggtgtgtgtggttccaaccggcaaatggatttgtgaggtatgccaccgtgggtttgccactaagattggccttggtcaaaacaagagaattagacatcctcttgtgagaaacgtggagaggatagttgcttcccatcctaaagagtcatcctctcgaggagcccacaagagagtatggactgatgaggaggaggctctcttggtgcaattggtggacatgtttgctggtaaaagaaacatcaatcaattaattgcggagcaaattccatctaaaacggcaaagcagatcagtgataaaaggcgccttctgttcagagttccctccgcaaaagatcatgtaggaagagggggtgccatcggcattgaacatcaggccgagtctgctaaattgccaaaggagggaaaattaaagcaccggtactgcgaggcaatcaaagcgggactatcagcgggcaagtttaccatgtatcgggaggcctttgagaaaattttggaagggcaaaatccgggtcaggtggtgaatgatgtttataaggaattctgtggtattctagatgtgcctagccaaattaaatctgccaagggtcggaaagcgcgaccgtcccgtagccccaaagcatccaaaactccaacaaattggatgcgtaagagagcaataaagaggggtaaattcttgagatttcagttgttatacgagttgcatagaaggtgctttgctcgtattatcttggacagcacggaagtcgtccagtgccagttaccatctagcgttgtccaggatcactttaaaagaaggtgggatatatctggtgtatttggtggcctacagaactttcctccttatgaggaggctgataacaccttgttcgaggccttgataactgaaaaagagattgaaaagagtgtgagtgagatgtgtaaaacctccgctcccgggccagatgggattactttgggtcaacttgttaaaaaagaccctgagttttcccggttgtctgagatcttcaacctccggcttattaccggcactgttgcagatgcgctgcgggactgcaggacagtcttgatacccaaatcttcagtgtcagagaagcttggtgatatcaataactggaggcccatcaccataggttcggtggagattaggttgttctccaggatcgctgcggcgaggctgtccaagacatgtcccattaatccccggcaagggggctttatttgtgcatcaggttgtgctgagaacctcaagctattacagcttgtggttaaaacagcaaagcgagagcgaaaacatctgggggttgtgttcgtggacatcgctaaggcctttgacactgtacgtcatcagcatgtaattgaaggtctggtccaaagaggtgtggatccacatgtggttgagttagtgagggaaatgtatcgggatatcaggacctacatttccatggaaagggaaaggacagaccacatttacattcactctggtgtcaagcaaggcgacccgatgtcacccttgctgttcaacttggcgatggaccccctactatgtaaacttgagaaagaaggtgaaggtttccatcatgtgggttggaaagttacagctatggcctttgcggatgatttggtgctgttgagggattcttgggaaggcatgtgtaataacatcaaaattttggaagccttttgtgaacttatgggcctccgtacacagggggaaaagtgccatggcttttacatcaagcctactagagactcgtatactatcaatgattgtccctcacggataattaatagatccctccttaacatgatcgacccagggagctctgagaaatatcttggcacatgggtggacccttggacaggctttgcagatcatggattatcagagaagttaatagattggcttcatcggattggtgcttcaccccttaaacctcttcagaaagtcaatatactcagaacttacaccatccaaagactgatatatctggctgatcatactgaagtgaacgtaggccttctcgagtcccttgaccagttaattcgtaatgcggctaaggagtggcttcatctccctccaagtacgtgtgatgcaatcttgtattcgagttttaaggatgggggtttaggacttatcaagctggtggcgcttattcctagtattcaagcacgaaggctgcatagattagctcaatcttcggatgaggctcttgtgagctatctaaaagaggtacatctggaacggttatttgagaaattatggttgaaagctggtgggagacaagagtccatcccgtcaatttgggagcccttactgttggttgaagtaggagatgtgggtgaggcccggtcagaatgggaggcacccgtcccgaaaatccgctacccaaaaccatgtgattggtggaaaattgaatttcagaaatggtgtcatttggttacccaaggtcacgggattacgaattttgagaatgatgcaatcagtaatgcttggataaagtggtttaagggcatacctcaccgtaaattgattacagctctacaacttagagcaaatgtctacccgacgagagaattcctggctaggggtagacaagaggatgtggttcgatcatgtaggcattgtggtgccacatttgaaacagtcgcacacattgtcgggaattgtgttatcactcaggatgccaggattaagagacacaatgctatctatgaaaccctgagtgatgaagctaagagggaaaaatggatggtattccaagagccacaccttagagatgatgttaatgagttctttaaaccagacttaatctttgtgaagggttccaaggcggtggctgttgatgtgatggtgaggtacgagcattctgtaacctcattgagtgaagctgcctcagagaaggctaaaaaatatcagcgccttcatttgcagatacaacaattaaccaatgctgtggataatcgactatgttggcttccctatgggagcccatggtaa

SEQ ID NO: 31029 - DNA, 3738 bp, Xenus cinereus
  source 1..3738: mol_type = genomic DNA
atgggatggctcgggcgaatctggttcgtttccgttgctacccagactaattactcggattgggcatttacggttcattccatcacgaaccctgagctgccaggggatgggaatgcagaaataagagggttggagttttgtaactcggaaaagggctattatgttgggcactccccctcctggttcagtgtacttgatactttaccggaggtctatgagactccgatgttgcagggcaatgtcatcagcccacgttctgagccggccgaacaggaaggagaaagaccatcttctcctccgataacacctccacctcccattctggaaaccgaggcagacctcccgcaagagggcacacctgtggtgaaggtcccggacgaaaatccagcatgtccatgctgcgggaaccggatgggaaggatctcggggcttattgaccatcttaagaggacccatggaaagagaaagatcttatttcaatgtgcccgatgtggaaaaacaaatttgaaacatcaaagtatcgcttgccacgtcccaaagtgtaaaggcgtagagggattgagtccagtaagagcttggacttgcgaggaatgcaatagatcatttgggacaaaaattggtctgagccagcacaaacggctcgctcacccagttacaaggaatcttgaacgaataacagcttcccgcccaaaagaggagagtgcaagaggtgcacaccgtcggtgttggtcggaagaggaagtggaattacttaaaaagctggaaaaacaatatgaagggaacagaaacatcaataaattaattgcagaacatttaccatcaaaaacggctaaacagataagtgacaaaagaaggggactggtgaaaagtccatctaagaaatctccatctaaaagaaaagggaaaaatctggcgctgcgagaacaacttatggaagaaggggaacatctaccagagagtggctcacaagatggagggggactgcggccccattaccgaaaggttattgctgaatggataagatctcagaaaataacctccctcaaggatgtctttgagagagtgatcaaagggaaagaagatctcccattactagtggacaaagctgcccaggaccactatgcatgcctgaaaatggatttgattgaagagggggatcggcaaagtcaaaagatccgagaaatccgcaggccccgtccacagaaaccatcaaaacaatggactaaaagaagggccagaaaaagggggcagttcctacggttccagcggctgttccacctagatagagggaaacttgccggtattatcctggacgacgtggaatccctccaatgtggtattccacttgacgtggtgcatgaagtattcaagtcaagatgggaatcacccggtacattcaagggcctgggaacattcaatactattggacacgcggacaattccgcatttcaaaccttgattactgcaaaggagatcgtgaaaaacatccgagaaatgaataaaaacgcagcaccaggaccggacgggatttccctgcgggatctcatgaaaaccgacccccattgtactaaattaatggaattatttaatttgtggttgactactggttatataccagagggaataaaaaattgtagaacaatattgataccgaaatcatctgtaccagaaaagttaaatgatgtaaataattggagacctataactattggctcgattgtattaagattgttttcaaaaatcttgactgctcgattaactaaggcatgtcctattaacactcggcaaagagggtttataagatctcctggttgttccgaaaatttgaagttattacaattattaattcgatatgcaaaaagggaacaccttcccctcggggttgtctttgttgacttggcaaaagcatttgatacggtgagccactcccatataattgcagttcttaaacaaaagggagtcgatgagcatataataagactaattgaaaattcatatgaaaatattaatacatatattgatatgaaaaatgttaaatctgaccttattggaatacaaattggtgtgaaacaaggcgatccgatgtctccaattttgtttaacttgtctgtggaccctcttttatgtaaacttgaagaaatgggtaacggatttcaatattatacgaaagatgtaacatcactggccttcgctgacgatttagtattagtaagtgggtcctgggaaggtatgcaaagaaatatagaaatcgtcgagaccttttgtgaacttactggtctcaaaatgcaaggggaaaagtgccatggcttttacatcaagccaacaaaggactcatatacgatcaatgactgtccaccatggactattaacggcacccccctcaatatgattgaacctggtagctctgagaaatacctgggtctatatattgacccatggacaggaatatctaaacccgagctactcgagaaagtcgatagatggttgtcgaaagtgggaaaggcaccattaaaaccttttcagaaggttgacatcttgaaggggcacctgatcccaagattaatttatcttgcggaccaagcaaatttgaaatcaactcacttagagtcccttgacttagccatacgaattggagtcaaggagtggttgcacttaccatcgtgcacctgtgattccatcctttattctaatactcaggatggaggattagggatcagtagattggcggcactgatccccagtgtgcaagctcggagactgcacagaattgcccaaactacggacgatgttttaagaactgtagtcgaaagagaaggaatagaaggagaatttaagaaattatgggtgacggctggtggtgacaaagaaaagattccatctatatgggaccccaaaacaattatggtaatatctgaaacgggcggtgaccaatcactatcggaatgggagactcccaatccaaaaattttctatccaaaaccttgtaactggcgaaaaagggaatttaacaattggactaaattattaactcaaggtcggggtatcgctaactttgaaaaagataaaataagtaacaattggattatacattacaggggcattcctcaaaggaaattgattactgcattacaactgcgtgctaatatttatccaacaagggaatttttatctagaggacggtcagaaacttatattaaatcttgccgtcactgtcaggctgacaatgaaacttgttcacatataattggctattgtccatctgtacaagacgcaagaatcaaaaggcataatcaaatttgtcatatattggcagaagaagccaaaagtaaggattggctggtttaccaagaaccgttattaagggatcagcaaaatgaattatataaacctgatttgatttttgttaaagggaatcaggcaatagttaccgatataacaattagatatgaaacatctttaacaactttggaggaggcagcattggaaaaagcaaagaagtatgcacatttagttactcaaattcaggacctgacgaatacatctgttataaattttacaggctttcctttgggatctcgtggtaaatggtaccagaacaacttcaaaatattaaaggaattgggtctctccagctcccgacaagaaaaggtcgccagacgattgtcaaactatgctttatttagctcggtggacattgttcacatgtttgctagtaaagcgaggacagaggtaagataa

SEQ ID NO: 31030 - DNA, 4179 bp, Aphelocoma californica
  source 1..4179: mol_type = genomic DNA
atggaaatctccaaaccatttttggggccgccgatacgcctgtaccaggtatcggtcggcacccaaacctccaattctgattgggttgacctggtgtcccgggatttcaaaccgggctccttgtctaagtcctgcggggtcgacctggcgtctttaatttctgaacgccgggtagccctgctgtctaaaaccgatcgggtagacctggtgtatttaacttctaaacgccaggtagacctgctggctaaaactaaccaggcagacctggtgcctcaaaatttaccatctggctctcctaattcggcagaaaatgaattagatctggtgaacttagagttttataggtcggattggtgtgttgataacgtgtgtggtcatttttctgtgaattgggtgggtttgagcgggctgcctgaggtgtatgaacaacctacaccacaaccgagtgcgggagggggcgaccatccccccaaggacagtgaagtgattgtgcttagcgacggggaggaaagcggcgagcacgagcgtgggagcgccttggagacttcgcctcctgagcccgagaccacctcggagacttcgcctcccgagccggggaccagcgctttaccggcaccatcccctcctccagcagaggaccacgggaagcaggcaccaggggacatcctagtggtgactattccggacaaaaatccaccttgtccatgctgtgggacccgggtggggggggtggggggcttaattgaacatctaagagaagcccacgggaggagggaggcctgttttcgatgtgctaagtgtgggaaagaaagtaacaactgtcatagtattgtttgtcactttcctaaatgcagggcaaagacagagacagctccggctggggagtggatctgtgaggaatgcgggagagacttcaaaactaaaattggcctgggacaacacaaaagattggcacaccctatgattagaaatcaggagaggattgctgcttcccacccaaaagagacctctaacagaggagcccacaaaaggtgctggacaaaagaggaggaagaactgttgataaaattggaaactcagtttgagggcaacaaaaatatcaataaactcatagccgaacatatcccaactaaaacagcaaaacagatcagtgacaaacggaggctgctgcccagaaaaccgacagaggatgtttgtgaggagcctggggtgagtcatcgcaccaggagagcagctgcggggctaaaaatagaacctgggctgagtactcagcctgggaaaggaacagaagataaagaacctgagataagccagcgactcaggaggccggctgccgggaggagagcggaaccagagataaggcaccaccctgataagaggacaaaacagctgggaaccatcgaccagcagagggaggggcaactgcaggcccattatctgaagaaactcggtgaatggctttctgccgggacaattaagaccttcccacgggcattcaagcagttaatcaaaggccgggagatgcaacccctggtgaatgagacagcgcaggactgctttggatgcctggaggcaaaaagccaaacaaaaccaacagcccgagataaggacaagagggagacccgggaggggaaaccgacaagaccccttcagaagtggatgaaaaagagagcagttaaaagaggtaaatacctacgtttccaacgtttattccatcttgataggggaaaattagctaagattattctggatgatgtagaatgtctgtcctgtgatatctcacccagcaaaatttattcggacttcaaagccagatgggaaacagctggtaaatttgatggccttggggactttcaaattaatgggaaagccgacaatagtgctttcagggacttaattacggctaaagaaattgagaaaaatgtgcaggagatgagcaggaattcggctccaggtccagacgggattactctgagagacatcaggaagatggaccccgagttttcccagaccatggagatcttcaacctatggttaacatcaggaaaaatcccggacatggtgagggggtgcaggactgtgttaatcccgaagtcatccaggccggagcgcttaaaggacattaataactggagacccatcacgattggatccatcttgctgcgtctgttctccagaattctaacagcaaggttaaccaaggcgtgccccctcaacccaaggcaaagaggctttatcagagcggcgggatgctctgaaaacctgaaactcctgcaaactataattcgatcagccaaaagagagcataaaccgctgggtgttgtatttgtggacattgccaaggcctttgacaccgtgagccaccggcacattctacaaggtctgcagcaaaggtgcgtggatccccacatcgtcagcctggtgagcaatatgtacgagaacatccgtacatatatcaccacggggaaaacacagacagaccacatccagctccaggttggagtaaaacagggcgacccgatgtcaccctttttatttaatctggctatggaccccctactatgcgaactggaaacgagtggcaaggggtaccaccgaggacagagcagcgtcacagcgatggcatttgcggacgatctggtcctgttgagcgactcctgggaaaacatgaagcagaacatcaggatagtagagaccttttgcgacctcaccggtctcaaaacacagggggaaaagtgccacggcttcttcatcaagcccaccaaggactcctacactgtcaacgactgcgctgcttggactattaatggcacacccctgaacatgatacaccccggagaatcggaaaagtacctgggcctgcagattgacccctggactgggctagcaaaatccgacctatctacaaaactagaaaactggcttgagaaaataggtaaatctcctcttaaacctctgcagaaactagatatcctcaaaacatataccatccctcgactgacctacctggctgaccattcggatctgaaagcagggttcctcgaggcccttgaccagacggttcggacgacggtcaaggaatggctgcacttacctacgtgcacttgcgatgccatcttctactcgagcacgagagacggcggtttgggccttaccaaattggcaggactgatccctagcgtgcaggctcgaaggctgcatcggctcgctcaatcttccgacgagaccatgaagatgttcctggataaagatcaggtggaacaactgcataagaagctgtgggttcaagctggaggggacagggagaagatacctgcaatttgggaagcaaagccggcgaatgtaccatctacctcatgcagtgcagacattacttctgagtgggaagcaccatccttcaaaagcaaatttcccaaaccatgcaattggcgtaagaacgaatttaaaaattggactaaattagtgtcccagggccgtggaattgaaaattttgagggagacaaaattagtaaccattggatacaatattacagaggcattcctcacaggaaactccttacagctttacaactgagagcaaatgtctaccccacgagagaatttctagccaggggtagaaaagataaatacaccaaggcgtgcagacactgtgaggcggacaacgaaacctgtgcccacatcatcggcaactgcccgataacgcaggacgcgagaatcaagaggcacaattacatctgtaaggtgctgtcagaggaggcaaagaagaaggactgggtagtgtttcaggaaccgcacctaagggataccaacaaggaactgtacaaaccggatctaatattcgtgaaagacgcccgtgcattcgtcgtggacgtgacagtacgatacgaagcaagcaaaacatcgctggaggaggccgccgcagagaaagtgaataagtacaagcacctcactgaagagatacgagaactgaccaacgcaaaggacgttgtgtttatgggctttcccctaggagcgcgggggaaatggtaccatgggaactttgaactgttgggtgctctcggcctttccaaaacaaggcaggagagggttgcccggactctatcctccattgcgctcacatcatctgttgacattgtacatatgtttgctagtagatctaggaactgtaaggtagtatag

SEQ ID NO: 31031 - DNA, 3693 bp, Cichladusa arquata
  source 1..3693: mol_type = genomic DNA
atggtacaaacgatttcgttgcgttacatatcaacgggcactcagacagacccgttagatctatgggtcataaaggccgatgtttcatccacaccccccacattgattgatgagaggttcgatctcgtatgtctagagtttgtgaactcctcctatagtgaggagagtggattccatccggaatgtatttgggagggcttggccaatttacctgaaccttatgagaccttgcctttgcggctggttcagagtgaggaatctgagtgtgttcaaacggttgtcgaagagcttaaaacacctgaggctcttcctgggcccagcggtgataggacaccagttggaacacctgtggtgtccgttccggacaaaaatccagcatgtccacgttgtgccacccgttttacccggatgctggggttgatagaccatctaaagagaaatcacgggcagaaaaagatctggttcaagtgctcgaaatgtggtaaacaaaatcttaaataccacagtattgcctgtcacttcccacggtgcaaaggggaggtatgtgtggttccaactggtgattgggtttgtgaggtgtgccagcggagttttaccaccaagataggcctgggccaacacaagaggctgatgcatcctcttgtgagaaacttggaacggattgaggcctcccatccaaaggtgtcatcattacgaggggcccacaagaaggtgtggacggaggaggaggaggctctcctgagtcaactggtggtggcatatgctgggaggaagaacatcaaccaactgattatggagcacataccatctaagactgcaaagcagatcagtgataaaagacgccttctgatgaaagttccctccaagaaagatcgacttgaggaggaaggtgcggggaaagaagaacctccccagagtgctgatttgccacaggagggacagttgaagctccaatactcggatgccatcaagagaaagttggcggcatgtgagttcactagctgccaggaggccttcgagaaatttattgatgggcaagatctgcagacggtggtgaatgaggtttatgagaagtttcttggtagcccatgtgggcttagccaggatgtgaaaccttccaggggccggaagttacagaaggtccagaaagcatccgggacaacaactaattggatgcgaaaaagggcaaagaggaaagggaaatatctccgatatcagaggctgttccatttacaaagagggagacttgcacggatcatattggataacatcgaagctatacagtgccaaataccatctgacattgtccatgctgcctttaaagctcgatgggaaacatcagttggttttaagggtcttgaatccttcccgccgcatgggaaggccgataacaccgtttttcaagccctgattaccgaaaaagaagtggaaaagaacttgaaagaaatggcaaagacctccgctcctgggccagatgggattactttgggtcagcttcttaaaaaagacccgaagttttccctgttgacggagatcttcaacctctggctggttactggaacgatacctgatttgctccgggactgccgaacagtcttgattccgaaatccaccgacttagagaaggtgggtgacatcaacaactggaggcctatcaccattgcctcgacggtgcttaggttgttttccaggattgtgacggcgagactgactcgagcttgtcccattaaccccagacagaggggatttattcgggcgtcaggatgttccgagaacctgaagctattgcagcttgtggtgagacatgctaaaagggagcattgtgacctgggggtcgtgtttgtggacattgccaaggcctttgataccatcagccatgaacatattattatgggtctgacgcaaagaggggttgatccccatgtgatccaactagttattgagttgtacaagaacatcagtacgtatattgatatgaaatctgagaggacagacccgattaagatcttaagaggggtcaaacaaggagacccgatgtcacctattttgtttaatcttgcgcttgatcctcttttgtgtaaattggagaccgatggttatggattccagcgaggacgtttaagacttacagctatggcctttgctgatgatttggttttgttaagtgattcctgggatggaatgtgtggtaacatcaagattttggagaccttttgtgaacttactggtctccagacaaagggggagaaatgtcacggcttctacatcaagccaactaaagatgcgtacaccatcaatgattgtccagcatggactattaatggttccccccttaatatgattgacccagggaattcagagaaatatcttggtatacaggttgacccctggactggctttgctgactcaggtctatcgaagaggctggaagaatggctccagcggattggggatgcaccactgaaaccccttcaaaaagtcgatatacttagaacgtataccatccctagactaatatatctggctgaccacaccgaagttaaaagtgggcccctcgaatcccttgacttgattgttcgaaatgaagtcaaggtatggcttcacctccctccaagtacgtgtgatgcgattctgtattcgagatgtaaggatggtggtttaggtattatcaagttatcggcgcttgttcctagtatacaagcacggagactgcacagattggctcaatcttcggatgagactctggtacaatttttaaagggggaacatctggaacttttatatgagaagttatgggtacgtgctggtggtgagaaggagtccatcccgataatttgggagcctattccaatggatgtaagtgttgggagtggaggtgaaggtttgtcagaatgggaggcccccgtccccaaaatccgctacccgagaccttgtaattggcggaaagtggaatttaatagatggaaacacctggtagcccagggccatggtattgaaaattttgagaatgataacatcagtaatggatggttaatccattacagaggcattcctcatagaaaattggttacagctttgcaattaagagctaacgtctaccccacaagagagttcctggccaggggtagaggggatgtctgcgtaagatcttgcagacactgtggtgccgattatgaaacaacagcccacataatcgggagttgcccaatcacaaaagaggccaggattaagagacataattctatctgtgagactcttagcaatgaggctaagagggagggttggtcagtattccaggaaccacatatacgggatgagaagcaggaattgtttaaaccggatttgatttttataaagggaaataaggcacttgtggttgacgtgacggtgaggtacgagcataacaactcctcattaaaggaggctgctgcggaaaaggctaagaaatatcaatgcctggtacatcaaattaaagatttaactaacgcagctgaaattgaatttataggctttcccattggggcgcgggggaagtggtatgaaaagaactctgagttgttaacggccctcggtctctctaaaacgaggctagggaaaactgcccgggccctagcatccagagcgctccttacttccgttgatattgtacatatatttgccagcaaagcacgaagtgttgtatccaataaataa

SEQ ID NO: 31032 - DNA, 3732 bp, Scolopax minor
  source 1..3732: mol_type = genomic DNA
atgggatggtcagggcgaatgagattcgtctcagtggccacccagactaaatattcggattgggcatttacggttccttccatcctgaaccctgagctggcaggggatgagattgcgaatattagtgcgaatatcagtggactggagtttgtaaactcggagaaagggtacgatgtggggctttctccatcccggtccagcctcctggctacattaccggagccttacgagtctccgagagtcatgggcatagtcatcagcccgcgttctgagcagaccgaatatgaaggagagagaacatcctctccaccaagaacaccatcacctcccgttcttgaagccggggcagacctccctcaggagggcacacctgtggtgaaggtcccggacaacaatccagcatgtccatgctgcggtaatcgaatgggaaggattacggggcttattgaccatctaaagaggacccacgggaagaaaaagatcttgtttcaatgtgccagatgtggaaagacggacgtgaaacatcacagtatcgcttgccacgtcccaaagtgcaaaggcgccaaggagtccagcccgttaagagggtggacctgcgaggaatgcaatcgaacgtttgggagtaagattggcttgagccaacataaaagactggcccacccagttgcaagaaacatagaacgaataacagctgcccgcccaaaggaggaaagtgcaaggggtgcacaccgtcggtgttggtcggaagaggaggtggaattacttaaaaggcttgaaaaacaatatgaagggaataagaacattaataaattgattgcggagcatttaccaacaaaaacagcaaagcagataagtgacaagagaaggggactggcgaaaagtccacctaagaagaaagggaaagatctggcgctgcgagaacaattgatacaagagggggaacacctggtaccgagtggctcacatgaagttgggggactacggtcccactatcgaaaggtgattgccgaatggttaagatctcagaaaataaccactctccggaaaacctatgagagagtgattaaagggaaagaagatcttccctcgctagtggatgaagctgcccaggactgctatgcatgcctgagaaaagatctaattgaaggggaggtccatcaaatacgaaagatccgagaaatccgcaggccccgtccgcaaaagccatcaaaacaatggacaaaaaaaagggcccgaaaaagggggcagttcctacggttccagcggctgttccacctggatagagggaaacttgccggtattatcctggacgatgtggaaaccctcaaatgtggtttgccactcgaggcggtacatgaggtattcaaatcgagatgggaatcacccggaacattcaagggcttgggtacattttgtaccgttggacatgccgataactcagcattccaatccatgataaccgcgaaggagattaagaaaaacatccgagaaatgaataaaaacgcggctccaggaccggatgggattaccgtgcgggatctccttaaaatcgacccccaatgtattaaactaatggaattattcaatttgtggttgttaaccgggtatataccggatgatgtgaaaagttgtaaaacgatattgttaccaaaatctaatgtaccagaaaagttaaatgatgtgaataactggagacctataaccatcggttcgattattttaagactgttttcaaagatattaacggcacgtttaagtaaggcatgcccaattaacaccaggcagagggggtttataaaatcgcctggttgttccgaaaacttgaaactattacaactgttgattcgatatgcaaaacgggaacaccaccccctcggggtagtctttgtcgatctggctaaagcatttgatacggtgagtcactcccatatattggcggtattgagacaaaagggagttgatgaacatataatacgattgattgaaaactcatatcaaaatatccatacttatattgacatgaaaaatgaaaaatcagaacctattggcattcgaattggcgtaaaacaaggcgatccgatgtctcctattttgtttaacttatctgttgatcctctactatgtaaactggaagaaattggtaatgggtttaaatgtcattcacaaaatgtaacagcactggccttcgccgacgacttagtgctattaagtggatcctgggaaggcatgcaaagtaacatcgaaattgtcgagaccttttgcgaacttactggtctcaaaatgcaaggggaaaaatgccacggcttttatattcagccgacgaaggactcgtataccatcaatgactgtcctccatggactatcaatggcacccctcttaatatgattgaaccgggtagttctgagaaatacctgggtctttacattgacccatggactggaatatctaaaccagaactattggagaaagttgacagatggttggagcgagtgggaaaggctccgttaaaaccttttcagaaggttgacatcttgaaagggtacttgatcccaagattggtatatctggcggatcaagcaaacttaaaaccaacatatctggaacatattgacttggctataagaaatgctgccaaggaatggttgcacttaccagcgtgcacttgtgatgccatcctatattcgaacacacaggatggggggctaggaattagtagattaacagcactaattcctagtattcaagcccggagattacacagaattgcccagacatctgacgatgtgctaaaagagattgtaaaacaagaaggaattgaaagggaatttgagaaattatggttgatggccggtggtgataaagaaaagataccatcaatatgggatcctaaaacaattatggtaatatcagagacgggcgatgacgaactatcagaatgggagatgcctaatcccaaattaatctatccaaaaccttgtaactggagaaaaagagaattcactaattggaccaagttgctatcacagggccgtggtattgttaatttcgaaaaagacaaaataagtaacaattggatcacacaatacaggggcattcctcaaagaaagctaataacagcattacaactgcgcgctaatatttatccaacaagggaatttctagccagaggacgtcaagaaacttatatcaaatcctgccgtcactgccaggccgataatgagacttgcgcacacataattgggtactgtccatctgtacaagatgcgagaataaaaaggcataaccaaatttgccaaatactggcagaggaagcaaaaagtaaagattggctggtatatcaagagccattattaagagacgaacgaaatgaactgtataaacctgacttaatatttgttaaagggaatcaggctattgtaacagacgtaacattgagatatgaaacaactgtaacaagcttggaagaggcggcattagaaaaagctaaaaagtatgcacacttaaaaacgcaagtccaagacctgacaaatgcatctattgtaaattttacaggctttcctttgggatctcgtggcaaatggtaccaaggtaattacaaggtactaaaggaattgggcctctccagctcccgacaagagaaggtcgccagacgattatcaaactatgctttattcagctcggtggacattgttcacatgtttgcgagtaaagcgaggacagaggtaagataa

SEQ ID NO: 31033 - DNA, 3768 bp, Tyto alba
  source 1..3768: mol_type = genomic DNA
atgggcctagcagcacgaatagccttcgtgtctgtggccacccaaacaagtcttttagacttgcgtgacgatgtggtccctcgtaccatcagagaccacgccaaattggtggacgttgggataaattttagaggattggagtttgttaactcagatgtggaaggattggaagggggagatctatccaccgtgactgagagtttagccatgttgccggaggtgtatgaggaaccttccccttctgcactggagggcaaggacatcagccccctccttcgggagagtgagtcagaaggcgagggggagctctcgcccccaggggccgtggctcaactcttcccattgccatcgtcgcctatcctggcttccgggggagaacctccaccggaaggtacacctgtggtgaaggttccggacaaaaatacatcttgtccatgttgtggaaccaggataggaaaagtgtcgggactggttgaacatctaaggagagtgcatgggaggagaaagatcttgtttcagtgtgcgaggtgtgggaaaacgaatgagaaacatcatagtattgcttgccacgttcccaaatgcaagggagccatagaggcaaccccaaaagaagggtgggcgtgtgaggagtgcggacggacatttgaaacaaaaatcggcctgggacaacataagcgtttggcccatccagtcactagaaatctggagcgaattatggccgcacgccctaaggagacttccgcgagaggggtacaccgaaagtgttggacggaagaggaagtcgagatcttgcgtaagttggagaagcagtatgaaggaaacagaaacatcaataagctgattgcggagcacttgcccaccaagacagcgaagcagataagcgacaaaagaaggattctgcacaagagtccggttaagaagagggaaaaagaccaagagtggaagaaacatctgagagaaggggaacatctggtgagcattggatcccggaaaagaggtggggggctgaagtcccattatcgaaagactatctcagaatggataacatccggaaaactgcgcattcttcatgcgacatttgagaaggtgatcgaaggcggagaagatctgccaacgctggttggtggtgcggtggaggactgttacgcacgcctgttcaagaggtcctccgagttggaagcgagtcaggggaggaaactccagacggcccgcacggcacgcccttcggaaccaccgaaggagtggatgaagaagagggccaggaagagagggcagtttctacggttccagcggctgttccacctggacagggggaaactagccggcataatcctggacgatgtagagtccctgaagtgcggtctgccgcttgacgaggtgcactgtgtgttcaagtcaagatgggagtcgccgggaacattcaagggcctcggaggtttcaagaccctgggtcgcgcagacaactcggcattcgaagccatgatcacggccaaagaaatctcgaagaacatcaaggagatgagcaagaactcagcaccaggaccagatggtcttagtttgagggatcttatgaagattgacccccactataccatgctggcggaactgtacaatctgtggctgctgactggtaccatcccggacatggtgaaagaatgtcggaccgtgttaatatctaaatcagccctgccggagcgccagaaggatattaataactggcgccccattaccatcggctcgatcgtcctgagattattctcaaggatcatcacagcgaggctgaccaaggcgtgcccgatcagtccacggcaaagggggtttataagatctgctggctgcgcggagaatctaaagttgctgcaacttctgattcggaacgcgaagagagaaaagcatcccctgggtgtggtgtttgtcgatctagcaaaggccttcgacacagtaagccataatcacattattgaagtgttaaaacaaaagggtgtggacaaccacataatttctttgatttccaacatgtacagtaatattcatacatatatcgacatgaagtctgagcagtcggatcccatcgggattcggattggtgtgaaacagggtgatccaatgtctcctatattgtttaacttatctgtggatcctctactgtgtaaattggaggaggaggggagtgggtaccaacattattcgacgagtataacatctatggcttttgcggacgatctggtactgctaagtgggtcctgggaaggaatgcggagaaatattgaaattgttgaggctttttgtgatttgacgggtctgaaaacacagggagagaagtgccacggcttttatatacagccgactaaagactcgtataccatcaatgattgtcctgcatggaccattaacggcactcccctcaacatgattgagccaggcagctcggagaaatatctgggtctgaaaatcgacccgtgggttggtatatccaaaccggaactgctggccaaaattaaagattggttacatcggattgaccgggctcctttaaaacctttccagaaagtagacatcttgaaagggtataccattccgcgcatgatctacttggcagaccaggccgatgtaaaagtctcgtaccttgaatcgctagatttgacaattagaactgctgtcaaagagtgggtacacttgccacctagtacctgtgacgccatcctatattccagcacaagggatggcggtctgggactcaccaggctatcggggttaattcccagtgtgcaggctcgaaggctgcacagaattgcgcaatcttcggatgaggtgatcagggaaattgtaaagaaagagggtatagagaaagagtatgagaaattatggttagcggcaggaggaaataaggaaaagattccatctatatgggacccgagttcggccatggtgatcacggaagtgttgggcggggaagatcaactgtcggaatgggaaaggcccgctcctaagaccatatttccgaaaccttgtgattggcgtaagcaagaatttataaactggaccaaattggcttcccagggccgtgggattaccaactttgagaaggataagatcagtaacagctggttagaaagatataggggcattcctcagagaaagatcgtcaccgctttacaactacgggccaatgtctaccccacaagagaatttctagcgaggggtaggcaagagacacatgtaagatcgtgtcgtcactgtcaagcggaaattgagagctgtgcccatatcatcggatactgcccggcggtgcaagacgcgagaataaaaagacataaccaaatttgtgaattactaattgaggaggcaaagaaaaaggaatggatagcattccaagaaccattgattcgagacgagaaaaacgaattattcaaacccgatttggtatttgtaagagaagaacaagcaatagtagtagatgtgaccattagatacgaaagtaaagaaacatccctagaggatgcggccgcagagaaaattaagaaatatcagcatttggaagatcagattcaggaattgactaatgcaacaactattaaatttatgggctttcccttgggggcacgtggcaagtggtaccagggcaattacaccttgttaaaggaattgggactctctagttctcggcaagataaagttgcacgtcgattgtctaatcgtgcattgttttcttctgttgacatcattcatatgtttgctagtaaagtaagaactgtagaaaatgtttaa

SEQ ID NO: 31034 - DNA, 3267 bp, Acrocera orbiculus
  source 1..3267: mol_type = genomic DNA
atgccaagacctccggaagatttcatttgcgattgcggcaaaatattttataccaacaagagcttcaggcagcatagaaaaagggtacataacatatcagaacctgacactaatttatgcccaatatgcaagagaagcttcagaaattactcaggtatgcgacggcatttaacattaagccattcatcgtccgacatcgtagaagctgaaacatcatcttcaactctccataggtgcgtttgtgggtccgcttatgactcacttactaaattgaagtctcatcagagacgcttttgcaaaggctcggatatcaataatttaacctgtcaagtttgtaatagacttttcactacctcagctggtctaactttacatcttaaaagtgctcatcccaccgttcataacgaagcattgaaatctactagtacatcagcaagggctccctggtcatgcgatgaggaaaattctctagccaaagaagaagccaggttagatcctaaattacctaataaggtaattatagagtttctctcttccttttcatcgagatctatagaagccattaggagccgcagaaggctgccctcctatatgaataaagtggaagcttttcgaaactatgcatcacagcaatgttttcaagagcagcgtctctccttgcttcaagacaacgccgaagtttcaaacatcaatctgataaacttcatacaaaatattaaacttccgacacaagccgataaagattttgcggattgcgttgtcaataactttaaggacttcgatcccgtagtactgaccaaatgggttgatacactttacaatgcccgcagaactgcaaacaaagtaatgaacgacaaaaagaaaataaatctattaaaggcaattgaacaatgcccctctaaaaggaaaaaaagaatgcttttatacaaattggcgcaatacgaatacgcttcagatactagaaagtatgcaaacaatttactagatgctaccatcgacccaggtagtgaaatctcacctgataagagtgaaacaaataagatatacgaggaagtcttttctacggaaggaattttggacctcgaatatatcagagatgatgaaaacatcatatctgtaagccagccgattactgaggaagagattttaacagccattaaaacaagcaaatctaatacctcaggacctgatggcattacgaaaaaaattatatttaaaattgggcatgcccgactatctcttctgttcaattccatgattttattaggtttgatcccggataaatttagacagttcaaaactataatgatctcgaagcaaagtaaaggtcttgaaaatcctaataattggcgaccgataacgatagggtcaatggtcatgagaattctacataaaattcttgctgcgagaataagtgattcaataaacttacatcagtctcagagaggattcagcaaactagatggctgccttgctaatattatcaccctagagagcgtaataaaagaaaaaagaagaaagggtcaacctctttttttaattaaccttgacatctccaaggcgttcgataaggtctcacaccatagcatattaagggctttaaaaaagtttaaaatagatgacctcaccaggagatatatcaagaatacctacctggataataaaacgattgtcacgtgcaggaatgaaaatttcggtgaatttcgcattaaaagaggcgttaaacaaggggaccccttgtcacctatattgtttaacatgatacttgacgagctactaaaaaatttaaatgccaattccggtacgaagctcggcgatgaaaatctgagtgctcttgcttacgcagacgatctagtcctcctagcagaaaataagcattctgcacaaaaccttttaaacataacttcaaaatttctcaagtccagaggcctagaaataaattccagtaaaagtggatctctcgctctctgcagtgttccgagcaagaaagccatttacgttgacaatagaatatcttttaaatatgataacgaaactcttcccgctttcaacgtagacaacgaatttaaatatctaggaagaatgttccgatcgacaggcctaaagaaatgcaatctattcaatttactcgaacaacttaaaactataaaaaaacagcctttaaaaccgcaacagaaattcaacatacttaatacgtatcttattccaaggtacattgcggagcttcagacgcccaacatcgacgcatgtaagcttaagcaggctgatcgaaaaatacgacagttcgttcgctcaattttacatattccaagtcattgctctaacaccattttttatgcgccttccgataaaggaggactaggtatctttcacttccaaatggcgataccaatcataatgttgagcagattgaataacctagaagatcattcagatttaatgaagtatactctagagatggctaagcccattatcaatcgtctaaaaaaaatgaatcctgcagctatcaacactaaagatcaattaagaactcatctaagtaatcaactctattcgagcaactctggcaggggtctccagaattcaacaataactgggttttgtacagattttatcaaaaatccaccccggtactggaaaaattcagattacattaaagccatccatctgacattcaacttgctgccgtgcctagggcttccatacaatccacccgagttccagaagtgtcgctccccaggatgtctgcataaagagaccgtgtgtcatatattacagcactgccctatcacgcatagagcacgtattgagagacacaacaacattgtcagcaaaattgttacaactgcacagaaaaaaaaagatttaacgacgtatattgaaccaactatcagaagccgggatggtgtattaaaaaaaccggacatcattattgagaataaatcctcagtaattgtctgtgatgtcggcataaattgggaaggatcaatatctctcactcaacaatggctgaataaacaggctatttatagctccccattattcattgaaaaaataaaggaaaaatttcctaataaagacatcttcatactccccttcattcttggagcaagaggaacttggtgtgctaccaatcgattcttctgtgaaaaactgcaattaacaaggtctacgaagaaagaaatcatccactcaactttaaggggtgggtggaccgctcacagagaattcatgaaacaagtttggcgtggacgtaatcgtagatga

SEQ ID NO: 31035 - DNA, 3096 bp, Drosophila sulfurigaster
  source 1..3096: mol_type = genomic DNA
atgcctcggatagctgaaagttattcagtgaattctcctacggcatccgtaggagcccatcagggaaggaacgtagatgctaatccagttgttggacatctatgtgtggaatgcggccgatcttttggaacaaagaccggtttaggtgtccacatgtcgcgtcagcacaaagacaggcttgatgagcttcgtacgcgtgttgacgtgaaaaccaggtggtgtgaggaagaattggccatgatggcgaggaaggaacttgagctcatagcaaatggcgagaggttcattaataaaaagctggcgttgcattttccagaacgcagtgtcgatgctattaaaaagtgtcgacagagggataattataaggcaaaaatcgagcagctaagagggcaagcggctcttatccccgaaattaatgaaccacaaaccattacgcgccgccctagtataagtgggcttgaatcttcttcttcaatgtcagagtcggttccaatcacaccatcgatacattcggacgacgtcctcatgcggatactgcggggcttcggccctgtgggatgtaatcgatcgtggagagtcgaggttctgcaatctatcattgatggagcgcagacttcgggcaaagaagcaactctccagtgtttgtctaactatctcctggaaatttttccgaatcgaaacgaaggtccggtttcggcgagagtctttcctgagcctcgcaataggagacaaaatagaaggcagcagttcgctagggttcagcgcaactgggacaaacataaaggtcgatgcatcggatccctgctagcaggacccgacgagtcggtaatgccaaaccaagagattatggaaccatactggagagaagtcatgacacagcagagcctttcctcttgcaatagcaccgtgccccatatgggacacttgcttgagggggtatggtcacctattacgtctagggacctgcaattgcatcaagtgccattgaattcttctcccggaccggacggaatatctccaagaactgccaggagtattcccagtggtgttatgcttcgcataatgaaccttattctctggtgcggcaaactacccacactcttccgaatggctcgaaccgttttcatcccgaaaacggtaagagcatcccgaccagaagatttccgtccgatatcggtgccttctgtcatagttagacaactcaatgccatcttggcatctcgattggcctcatcagtcgattgggatccgcgtcagcgggggtttcttcctactgacggttgcgccgataacgcgacaatagttgacttaatcctgagggaccaccatagacgtcatgcgtcgtgttatatcgcgacacttgatgtcagcaaagcgtttgactctgtgtctcacgcagcggtaattgacaccctatccgcgtatggtgcaccaacgggttttgttgactacgtacgtagcttgtacttgggaggtggcactagtctcaatggtaaaggctggagatcagaggaattcgtccctgctagaggtgtgaagcagggtgaccctttgtctccacatatgttcaacttggtcatcgaccggttgctcaggtctctaccggacgagattggtgtcagtgtcggaaatgccaaaacaaacgctgcagcgttcgcagacgatctggtgttgtttgcttctacaccgaagggccttcaggcattattggataccacggtctcctttttggcgtccgttgggctgaccctaaacgctaataagtgttttactgttagtgtcaaggggcaaccgaagcagaagtgtactgtgatcgaatcacggagcttttgtgtaggttcgcgcaagtgtccaagcttgaagcgttctgaggaatggaagtatcttggcatccagttcactgcggacgggagggcccgctacaatccgactgaggacattggtcccagattggatatcatatcgcggtcccccctgaagccacagcagaagttattcgccctcagaactgtcctcattccacagctatatcacaagctaacccttggtagtgtggcaataggcgttttgagaaagtgtgacagactggtacggtcggtcgtaaggaaatggttagatcttcctatggatgtgtcagtagcattcttccatgccccccacacaagtgggggtctcggtgttccctcagttcgaaggacagctccaatgctgcgcatacagaggttaacgaacataaaatggccccacctcgagcaatccgagacagccagttcgttccttagtgcggaaattcggagggcccgagataggtgcaaggcatcgggagacgcggctctggatacacgccttttgatcgactcgtactgggcggataggttgcactcctctgttgatggtagcggtctccgtgaagcagggcgttatgctccgcaacacgggtgggttgtcgcacccacgcgtttgttaactggaaaagcttatttgaatgggatcaaactgcggataaatgccctacccacgcggtctcgtaccacgaggggaaggcacgaattggagaggcagtgtcgtgcaggatgtgatgctcccgaatcactaaaccacattctgcagaagtgtcatcgtacgcatgggaggcgggtggctagacacaacagtgtggctaattatctcaagcggggtcttgagacgagaggctactctgtcattgctgaaccaagtctgcagggagagaacaggatatataagccggacctggtgggtttccgaccagatcacacgatagtgatcgacgctcaggtagtgactgacggacttgatcttgaccaagctcatcagagtaaggttgagatctacgacagacaggacgtacgaacggctctggttcgggattatcaggcacatgaggacattaaaatcgtttctgctacgctaaactggaggggcatctggagctatcggtcggtaaaacgactgagagcactgggagtccttaacgctggtgatagtaatattatcagtaccagggtggtagatggcggagtctgcggctttaagacgttcatgttccatactggatatcgccaaggagtgggttag

SEQ ID NO: 31036 - DNA, 3210 bp, Rhopalosiphum padi
  source 1..3210: mol_type = genomic DNA
atgctcgggtccgcggcgccgccaagcgtcacgggctcttttaccaacacattgaataataataattttatgcctcggatagctaccgcatcccaaacagcgggcggtagcaaccgtgttggtgcggacgtagtcgggactgtcacctcggccacatccgcgtacaagtgtcgtttttgtacaaaaagttttgccaccaagattggtgtcggtgtccacgttagcagtgcccacgtgcaaaatgccaatgaccagattgacgtggccaggagcaaagctcgttggcccgtcgaggaacaaagattgttcgcagcgctcgaggcagaactcgtgttcaataacattccacccggccagattaacggccagctttatgaaaagcatcggggccgcacccatgagtctattaaggggcggcgaaagacccttaagcaccgcgaaatggtggcgactcatctcgcctgtcttaagggggtcccgaatgtaccgattactgatacggtaccggtggaatcgaactcgagtgatgcgcgaccgctgcccacggatgatgatggcagtgcggcagttaatgaccgatcgacaacagtagatcgattgagtccagcccttgaggctgggcaaaaggcggttgacctcctatcaaccgtgtccggtcatggagcagacaaactcctattagctgcaagacgcctagttgagcaatctttggacccgtgccacgcaatagcggcgtggtacatagattataactgcaaaaattcccgtaagaaaacgaaaaagggaaggcgaccgggcaccattcccggcgccggcatatgcgctggtcgcaggccgaataagaaagcgttgaaaacagcctgttacagacggaacgtcaccgaatggcgtaaaaatgcatctagcgttgctgagcgtgtacttacgggtgtagaccagggggctctaatgccccctgcgtcagagatgaccaaatactgggttcccattattgagggtaattttgaatctcgtccccagaccccggccgtatcttttgacacacacggcacaccgcagaacgcaacggtatttgatgtaattacgcccgaggaagtgtctgagtgccttcccagcaaaacaactgctcccgggccggacgggtttccggcccgtctgtggcgacgtctcccctgtaacttgacagccggcttgttcaacctgtttgtcgcctacggttctttgcctcctatcttggtgaagtcccgtaccgtctttgtggcgaagaaaggagacccccagtgtcctggtagttatcggccgatctcgatcgcgtccgttgctatcaggcacttccatcgtatccttgctcgacgcctggaaaagttgtctctggtggatgagcgacaacgcgcattcagaagggccgacggtgtggcggaaaatcttttcctcctgcagtcggtcttgacggatgcccgttcgtcgtgtaagggcttgtgtctagcgtccctcgatttatcgaaggcgtttgacacggtgtcccacgactccattgcgtccgcgatgcgtcgcgttggcttagaccagcgcttcgtagactacattcgcggaacgtaccagcattcagagacatttcttcaggtcggcgggcaggctacgcgggggctcttcccacggagtggcgtcaggcagggggaccctttgtccccgcttttatttaatctggtggtagacggtggtctccaagaaataccagaagcagttggctacactctgggtgatactgtggtgaacgcaattgcctttgcggacgacgtaatcttgttggcggaaacgcctgatggactacgaagagcatgcgaggcgttcacggaccgattgagtgtagcgggtctaatggcaaatccgcagaagtgtgcgactcttaccctggtgccgtccggacgggaccgtaaggttaagactgttgacgaggtctatacccttagtggtatcgacctcccaacgcttaacgttacctccctatggcggtatctgggcgtaggtttcgcaggaagtagaatcgatgccttcgactccgcggcgtacgtaacagcgcttaatcggatctctacggaaccgatgaaagcgcaaatgcgactttgtatcgctagagactacctcataccgaagttcgttcacggactgacgttctcggtggtctcggtacgtaagttacgcagtctcgctcacgagacgcgccgcgcagtcaggcgttggttggaccttcccacttcgtgcccgaacgcgtacattcactcgccaacatcggcgggtggcttgggtattcctgactttgtccttttcgtacctcgtaaccgtgtaaaccgtcttgtaagacttgagaactcgtcgctcgccgccgtccgcgaagcgttccggcttcatggccgtaccgctttggcgtccgcgcgtcgatcgaccgagggtcaccgtctcaagcttagtcatgcgcagcaacttcatgcgtcagttgatggctctgaattgaaagcttgttcaagtgagtcggcatccgttgcgtggttgagacgtcctgacggcatcccgtcgtcggacttcaaaaactacgctcggattcgtatcaatgcgttgccgactcgcaagcgggtaaaccgtgggcgcaacggtctggctcattgccgggcctgtttcgccccggcggagacgcttgcccacgtagtacagagctgtcctcggacgcatgatggtcgcatcttgcgacatgactgcgttgctaaacgcatcgcgggcggtttacatgacaagggttacgaaatagaaagggaatacctctataagctgcataacggaaatttaaagccagacatcgtagctaccattagcgacgagacgagaggccgtatttccgtgatatgcgatgtgcaagtcgtttcgggcataggaaccgcactctggcacgctaacaaggtcgagaagtattccgaccgagtggatctattatccgcgatccgggcacgacaccattcgaccgatgtacgaacggtcgccgccacgctgacatggcgtggcgtctgggaaccctcgagtttccagagccttcgggcgcttgggttgagtagaggtctactcgaaggactcgttacacgagtcctgaagggtaccctctccaactggcaaacttttaatactaaaaacgacatgacgacgcgggttggtgtcgggtga

SEQ ID NO: 31037 - DNA, 3345 bp, Nemotelus nigrinus
  source 1..3345: mol_type = genomic DNA
atgaaaatagttggattcaataatcagaacagtaataatcacaatctgcggcggaggcctcggaccgccgtaatccaacagctgggtgatttcatcccagaacagcccaggcaactccgtgctaaccccgtacaggcaccaggcctaaactccctttcctcccaagaaccaatgcgtgtgccccgaacagtaccccctagcgtccctgagccggagccaccacctgctcctcacgtctgtcctgaatgttcgaggtccttcggatccaagattggtcttggtgtccatcgaagaagggcccacgcggaagaggttaaccaagaggttaacgtcgagaggacgaagaagcaatggtcatcggaagagatgcgaatgatggcgagggaagaggcgctagccacaatacaaggagttagattcattaatcaacatcttgtcgctaatcttgatagttctcgcactctcgaggctatcaagggcataaggcgcactactacataccgtgagatcgtcgccgcagcactcgctgacctacgtgctgccccgtctacaagtggcatatcttcaccatctaacacaagtaggcgacaacgctcatctagctcctcctcttcctcgtcaccatcttcatttcactcggccaatgagtcgctcgacccattggaggcatccctacatgacctaagtctttcggcccgatggagcgccatgtacggcgatatccacgtcgcagtccaagctttactaccagcgctccacgaaatcagcggctaccataagtcctctctaaccgaagtaggtgaatgtctgcttcggggacgagatgcgtgtgatctgctcgactcgtggtttcggttagcctttccatctgctgaccgaccatcggctccacatccgcgaggacttccgcttagaccacccatcggagctccgcggcatgagaggcgactctttaggaggaaggagtactcacgcatgcaagacatgttcaagaaagacatgtcgcgggctgccaaagaggttctggatggcttaaatatctcagtccccccttccatgcccgtcatggaaagttactggcgtactattctaactttaccatccagaccatatgctgcaagccaacagacgagtgtcagtcactctctgcagcatacttggctacccgttacatgcgaggaaactgaatctgtaagggtccccctctcgtccgcgcctggtcccgatggagcgactgcaagacaatggaaggccgtccctgctgttgttaaagccttcatcttcaactcgataatggtctctggtactttcccggaaccattactgcaaagtaggacgatctttattcctaagaagaacaacagcgactcgccgggtgatttcaggccaatcagcattccgcctatagcggtccggcactttcataaaatactagcaacccgtttacgggaagctaacatgattgatgtccgacaacgctgcatggatgatggttgcctggaaaacatctgcgtcctggcatcgatactggaaaatgcccgatcgaaacttcaggaggtgcatctgtgccaactggattttgctaaggcatttgacagtgtcagccatgaagctatcgctggtattcttgggagtagaggtttgcctactgcgtttgtggactacgtagttgggacctacagacgcagcaccacgaagttggaaatgaatggtcaacactcggacgtgatcagcgtaacaaggggggttcgtcagggcgatcctctatcatcgttgatcttctgtattgtagtcgacgaagtcctccgatctcttccatcagagatcggcttcgagctagaaggacagcgtgttaatgccctagtttacgcagacgatataatccttgttgcttccaccgagtctggtatgaaatctatcctccaaaccaccgaagagaaggcaggcttgcttggactgtcaattaattctcagaagtcggctgctctttccatcatccccgatgggaagaacaagaaatataagattctgaaagacacccaatttcacttcggcgacggtacaccggtcacccaattaggccccacggataagtgggtttacctaggtgtcgatttccgaccccaaggacttacgcgcgttggcgggaagttggagactcttctggagaacatttccaaagccccacttaagccacagcaacgacttaagattgccaagtctttcctcatgcctcgattccaccacaaactgattcttcagggaaccacgctcaaacatctacgagcaatggacaggcagattcgactatctgttcgcagatggttgcgtctgcctaaagacgttcctaatgcatactttcatgcacctattcgtgaggggggtctgggcttacctgccttcgagctgaccgtaccgtcaatgatgttgcacaggttgacatcattgaaccagtcgacattcccggcagcaagagcagccttcaacgctcctttcattcgtaagcgaatggaatgggctgagagggttgcttttcgcgctgggactgtgctgcggtcacgaagtgcagtgaacaaatggtgggctacagcccttcacacatcggtcgatggttccgacctaagagagtgcattaaaagcaatttatcctcgaactgggtcgatactccgggatctatgatcccgggtagagactatatccagtaccatcacatcaggataaatactcttccaaccaggattaggacgtcacgaggtatgagaaccccctcgcgcgatataacgtgtcgggcaggttgcacagcgaccgaaacagcagtgcacatcattcaatgctgcacccgcacgcatgggggtcgtgtcaaacggcacgatgcaatttgcaaagttcttgggaaatcactgagggacaaaggttggcatgtccaagccgagcctagatttctaacagaccaaggtctccgtaaaccagacttggtgtgcaagaaggacggtagaatctgtgttgttgatgcacaagttgtcagcggatcaacatctatagacgccgcacaccagaggaaagttgactactatcagaacaatggagacattaccacttcccttatgcgcgaacataatgtccccagggatagtataactttcacctcgtgcacaatttcgtggcgaggaatctggtccaaaaagtcggcaactgaccttgtattactagggctatcaaccaaacttttatcatcattgacgacaagggtgctgcaggggagtcacacaaactggtctaggttcaacacaatgacagaccacgcgttcgggagggaaggacggggaagggccggggttgggtga

SEQ ID NO: 31038 - DNA, 3063 bp, Chlorops oryzae
  source 1..3063: mol_type = genomic DNA
atgggtgctaatacaaatacaaacataaatacgggcctggataacccgagactagaggtagctgcctctagtcatcaagtgacaatgagagaagagagagaatcaggaattgacggttacaaatgtagattttgtgtgcgatccttcccaacgaaatccgggaggggcgtccatgaaaggcggaaacatcctgacgggttggatgaggaacggttatcagcgcagcgaattgtgaaagctcgctggtcggaggaagaactgcgaattcttgcgagtgcggaagcagacctggtaagagatggaactcgtttcattaacttggaacttgggaagatctttccaaataggtctgtcgaagccatcaagaaggcacgccaaaaggaagtctacaagggttatgtacaggcaaaattgacgggaacaccgccagtacaggacattcgcccggaagtagactctcccgatgacaccttcttgacgcagatgcaacagatctccctttcaccctcatcaaccaatgatgcattattagagcttattgaacatgcggagcgtcttggaaaagatgaaacacttgctagactggctagcttgttggctcgtctcttccaatcgggaacaagacgcccacgtgctcgtgtagtcgccggagacgatctgaatcctgggcaaccgacgcggcgccgggcacccaataggaggcagagacgtcgtatggaatatgcacgagtacaacgcaactttcaaaaacatcaggggcgatgcattaaaaacattctggagggtatccatgatgtagtggaacccccaagaaacattatggaaccttattggcgggccataatggaacaaacaagtttcgaatcaccatctaacgaacaaatgcaaaaccctggtaccgccaacgctatatggtacccaattcggtgttcagaagttcataagctcgatgtatcaacgtcacctggtccggacggaattaaggcctcagatctaaataatattgcgagagaaacgttggggacaattttaaccatattgatgtggtgcggaaaattaccacctgcccacaggggttctcgaactatctttatccctaaaaagggtgatagctcagaaccaggtaacttccgccccatcacgatcccatctgtcctagccagaatgcttaatagcattttggcgaagcggatactggaatcatttgtgttcgattccaggcaacggggctttataagatctgatggctgcgctgacaacaccactcttttggacatgttgctacgagatcaccatcaaacgtatgcaacatgccacattgcttgcctagacattagtaaggcttttgactccgtatcgcacaatagtattgaggtggtactaaaagactatggatttccgtgtgaattcatagcttatgtaggagaaattctatctaattctcctacagtgctttgcggcaaaggctgggtaagcgatgccctgattccagggaggggtgtgaagcagggggatcctctctccccgctgctttttaatattgttgtcaaccgacttttggaaactctgcctaaagatgtgggctcaaacataggtgattatcgcctaaatgctatggcgttcgcggatgatcttatcttggttggtaagactcccaaagggctcgagatgttactcgacttcacgcacgattacctcaaatcatgcgggatggcgattaattcatcaaaaagcctaacgattagcattgaagcgaatgcgaaaagaaaaatcaccatgatcaacagcaccagagttttcaaaataggtcaaagcgttattccgtctttgaagagaacagacgaatggcggtatcttggagtgacgttcacgccagagggtaagactttgttcagacccaaggatgaactgatccccaagcttaccgggctacagcgggcgccgttgaaacctcaacagcgtctgcacgcacttaaaacaattgtgatacctcagttgtatcacaaaataacattgggcaacattaagatcggttgtctgaataaagccgataaatttattcgaaatacagtgcgaatgtggctacgcttgccgtctgattctccgattgcctacttccatgcacctgtgagtcatggaggactaggtatacctgcgctgcgatgggtcggtcccatgcttcgcgtaaagagactgaccaatctcaagatgccgtgcctcgatacctgcgtgagagcaaacacattagtagcaagcgaaatacaaagagccgaacgaagactgctaataaatggctctgctttgcgatcacgtcaggatatcgataaaatgtgggcaaataggttatggtcgacagttgatgggcatgggctatctgactgtcactatttcccacaggcaaaccggtggatacgcgaaccgaccaggttgttgtcggggcgggactatatcaactcaatcaaactccgtatcaatgctcttccaacgagatctcgtacctcacgcggaagaccaagcattgatcggcagtgtagagcgggttgtaatggtccagaaaccctgaaccacatccttcagcaatgtcatcgcacacacaactctagaattgctcgacatgatgccatagttaagtacatgaagagaagcttggacactaagggctatagtactgaaatagagccaagacttcagttaccaaatggaacaatattaaagcccgacattgtggcgagcaaggatagaaacgtgtggatcattgatgcgcaggtgaggaccgaatgtaacttggatgaagccgacctgaataaagcacgcaaatacgaccgagaggacctcaaggttcttctcagaagtagatgcgatgcagtggacataaatagctatgcggtaactcttaattggcggggagtgtggagcaaacgctccgcacaaaagcttcttaacgccaaaatgattagcaaacaagaccttgcaataatcagcacaagagttatcgtaggtggtatagctatatggaatattttcaatcgcacaacgtcgttcgtacctgccggtatcggatga

SEQ ID NO: 31039 - DNA, 3441 bp, Andrena bucephala
  source 1..3441: mol_type = genomic DNA
atgtttagtagcaacgaagatgaagtagcctcggacgcggggatccccggccctgggatctccgtggcggacttgtccgctgccgataggagggccattgttgacgacttagaccacgaaaacggacatgatttttcccaaacggttgggttgccgctggacggccccatccggtgtgctgggtgccaaaaagaaggcaggaacaaacagttcctgtccgaaaaggatttcaatacgcatgccgcagagtcccatcgtaaaatggtggtccagtgggagtgccaagaatgtggcaagaaatacttacgaatacaccaactcaaatgccacttgccaaagtgcaaaggagcggtggaagataccgttggtgaattccgatgctcgatgtgtgacactgcttttggaacgcaaagaggcctatcaacacatgaaaggcacagacacccaacactgagaaatgaaaagaggaaaggcgccggtggggccgggccagcggcggctaagaaaggaaggaaggccacagtctggtcggaggaagaaacagctctcctccgagagctggatcgactgcatgggggcagcacccgggtaaatgtgcgaatcagggagcacctgcccgggaaaacgcttaaacaaataagtgacaaaaggcgacaattgaagccccgtgaggacgaggtcggatgtgccgcaagtgaggagtcgggcacagaggaagcagtccactccctagaagaagaagtcccggcacggccagacagtggcgatagtagccaggtgcctgctttgagtagggcttggcgagaaataatgaaagaagcaatctcagcccctgggccagagaatgtcgaatgggccagcatcgcaagaagcatagagatgctggcgattgacgaggaagccagtaacgagcagttagaaggcgtggtgggcgaagtattcagcgtcctactgggtaacgtacctgccacgaggccccgtgaaaaccgggggcgcacggggccacaaaatgctggaagcgaaggggcacgcttcagcaggcgcacaagaaggcgcagattcaggtacaataggtaccaggaattgtacaagaagtgccccaggaagctggcggacttagccatcatgggtagcaataccgaccaggtagacctagaggtacgctacccacagaccgaggaaattgaaaggctatataccgccctctggggcaaggagggccccagtgatgtcaacctgcactcaggtggcggtgtggcggggacggttccgaccggtgaggtgtgggtgccggtgggggctaatgagattataagacgcatagcgaaaatgaagccagggacggcagctggtccagatgggatcaaaaagacccacatcaaaagagttggcgcagtgcaggtcctggccaagctctttaatttgctcctgctgaagggatactacccaaagcaatggaaggcaaacagaacgacgttaatcccaaaaccagggaaagatacgaaagacgcacgaaactggaggccaataacaattggctcccttattggcagactgctatccaatatgatcgatagccgaattagggataacgtcagcttatcacagcgacaaaaaggcttcatgaaagacaatggttgtaagcacaatgttgcaatcatgaagtctgtcttggacagaatgaaaaagaccaaaggcggcgtgctaaccgtagtggatatatccaaagccttcgacacggtgcctcacgcttcactggtcgcctccctggcagccaaaggaatgccggatgaagtgacctcctatataagagaaatgtacaatggttgtcacacaacaatcaaaggcagccagggtggcagtattaacatcacactcctaagaggagtgaaacaaggagacccgctatcgccgttgttgtttaatacggtgatcgaccccatagtaagtcagattgagaacacaaccaaaggggtcgatttaaatgataacaatgtcgccgtgctggccttcgctgacgatctagtcttgataggccaagatcgaaaggaggcagtcaggcagaccaaaatgctcgccaaatatctagaggacctcgggatggaactgtccatcgcgaaatgtgcaaccatcgaggttgtttctaaaaacaaaacgtggttcctcaaggacccagaaatcacagtgggaacagacaggatccccaccctgggaccagaggaaaccactagatacctgggtatcacactaaacccatggagtggattgaaggtagatagagagaggcttaaagaagtcacgagggcggcaagcgctatagcgcatatggggctcaagccccatcagaaagtagatgtaatcaggacgtacttgctgcccagagtcatctatgaattagtaacaagtccaccgccaatcaaggtcctcaaggagctagaccatgaaataaaacaagtggtgaagaacatattaaaactgcacccgtccactacggacggtatcatctactcgatgaaaagccatggaggtgtgggactccaaagaatagaagatattgtcaaattggcggtaatccgcaacgggctcaaaatgcttgactctacagatgatgtagttcaagaagctcttaaggaggaaaggggtataatcgagaaatatgcaaaatccctgaatctgagctggccgaccacgatggtcaaaatagaagaagcgagaagggagagtaagaaaagagacaccgaaaagtggcgtcagctaatctcccaagggcagggcgtggcggatttcagccacgatcggattggcaacgcgtggttgtacaatccgaccctgctcaagccttccagatatctggatgcgctcaagttgcggacgaacaccttcggcacaaaagtagcattatcgagggcaagtaagagcatggacgttgcatgccgaaggtgcaaagtccaagcggaaactttggggcatgtaataggcaattgtacccacactaagcccatgcgaatgaggagacacgatgaaatcaaagatttcatcggcaatcgcatggcaactaagcacgccgtctttgtcgagcctaccgtgaacgtcttgggagagctgaggaagccagatctggttattaaggaccaggagaggctcctcatcttggacgtcacggtacggtacgaaatgaatgataaccttcgaaaggcgtatagagagaaggtctccaaatacaaggaaaccctggaatacatcaggatcaaaaccaatagcagggaaggaagggtactgcccatcgtggtaggggccagaggggcaatgcccacacagacacaagaaaacctaatgtcccttgggttcagaaaagaagatatggtcaccatttccatgatagcattaagatcctcactggaaatggcgaatgcctttatcgattacgatcacataaggtaa

SEQ ID NO: 31040 - DNA, 3363 bp, Ascidia mentula
  source 1..3363: mol_type = genomic DNA
atgatgaatccgtgttcaaaacgaaaaacgcccgacagaagcggaaattctgtcaaggaattgacgggaatattgactgttcgtcccggaaggctggaacggagtgcagatgttcatctgacttgccaaccgggggtggtgatgaggaattctccttccacttcgacagtcaatttgacgtatgagggaaaagaacgaatacgttgccaactgtgctctgaggtcctgcccacggactccaaggcacaaggacatctgcagaaacatcgagccagaagttccggctacagctgcggcagatgcaagaaaacttacgagcgaatgtcgcaagtctcctgccactttgtcaggtgtactggcaaacggcaggttgaagacgaaacgaaccttgaacgacgtcaattcgtttgtggactttgcagacgcagtttcgatacgatgaggggcatgcacttgcatcaacgctcgcagcacccctctagttatcatgaaatgctggaagcaaaggacgttgcgaagaggaaggcctatactagcgatgaaattaacctcattgctatggccgaatgtcggctcagagaaaaacctcgcctaattaatgtctacttggcaggtttaggtcttgtagaacgatcagcggaccagattcgagccatacgaaaatccgaacggtaccaagctaccctcgcttcgatgaggaacgaaaatcgagacaacagccaagaacatgaagcggtcgacgacccacaggctgattggagcgaggtgttcgatgcccaccttgataagttgtcagcctcgggcaactcaaagagaagtatctgcgcaataaatcgtctaattagacttcgaaatgagatcgggaacgttgttgaagtattggacgatttattgcgcaggttgtaccctaagatttttgccctcaggtgcaacccaatgaaaaagaggaaggaggcgaggaaagatcgagatgatgtgcgcaggaagccatcggagatcaaacgcgaggagtatgctctccaacaaaagctctggagaagaaatcgatccaaactcgcgaagatcttgctcgatgacgcgcctctcaatccggagggccctccgatcgaggaggttgaaagagtatatcttgaaaggttcggtgacgagtcacccccagacgaggagcgaattgagaaggcgaaagtcaacagacaaatgggaagtgttttgcttcctattactgagcaagaatgttcgatggttttgaggcagttgcagaactctgccccaggtccggacaagttgaaggtgcagcatctgaagctgattggttcaaaggtcctctgcaggatcttcagcatctggatgcgtgcagggaaagtccccatgcgactgaaagagagcaggactactctaattccgaagtccaataaagatctcgaagatatcgggaagtggcgaccaattaccatcgggtcgcacttggtgaggctctacaccaagatcttggcaagacggcttcaaggagcagtaaccctgaattaccgtcagaaagcattcagacccgtggagggttgtgccgagaacgtgatattgcttaatagcattatcaaggacgcttcaacagccaggcgtcgcacgaacttggcagtggcaatcttagaccttgccaaagctttcgatactgtgagccatcattctgttatccgggctctcaaaaggcaaaatgtgccgcagttgcttattagcattgtggaagatctgtatcaagattgttggaccgtaataagtcttggtacagattccacttcaaaaatccgtgtaaataggggagtgaagcagggatgcccgctgtcgcctcttcttttcaacttggtgatagacgaactgttggacgagctgcctgatcgcttgggctataacatcaagggagtcaatgtgaaggcattggctttcgctgatgatctagtcctgatcggcaactcgcctgaagggttacagagcatgatggaaaccaccagtgaatttttgaagaaaagaggcctgcggctccagaaaaagaaatgtacaaccctcgggattacccacacccgaggcagaacgagcgcgacgagaattcggacctccccattcgtgttgattggagaagatccagttcccgttatccgtcctggcgagtggacgaagtacctgggggtgcaaataggcccccagggtacctgcaagcttcaaagaaatgcggtcagggagaacttggaacggctccgcaaggcaaggctcaagcctcagcaaaaggtgttcatgctgcgattccacttcatcccgaggtggagttacagtctggcgataacgtcccagacggtgaacaccttgaactttatcgatcgagaagtgcggaggtgcgtgaggtcaattgtccatgctccggcatcgttgtcaaacgacttcattcatctgcccacaaaatgcggagggctcgggatcccctgttgtgcagagacgtacttcttctcgaagttgcgcctaaaagacaggttgttaagatcggaggatcctgcgatcgcagttttggcaccgacactccataataaaaccatggagtgtctggagaagagattccgcgctgaagccgaaggaggtaatttaaagagggcctccacaacatcggcacgtcggctccgcttttctgagaaggtccagggatacggatctcttcacttttcagataagtattgcaataactggctagtcggcgcaacggcaaccttaacgggacgaaattttgttcagggatgtgccttgagatctcaaacactccctactcgcgagagcattacaagaggacgcccgggcgaaggcgcagtgtgcaggaactgcggattgcagaacgaaacgcaggcccacattttgcagaactgccacgtgacgaacaaggctcgtcttgctaggcacaacgctgttctgcaggtgttggtcgcgcggttaaggaaagagaactggcgggttcaagaagagcccataatacccacggcgagtggtagcttcatgaagcccgatgtccacgcggtatcacccagtgggcagcacttcatctgggatgctgcagtcccctacgaaggcaattcaatgtcgctggaggtagcgagaagggccaaggtgcaaaaatatgcatctcgaaaatcagagattgcaaaatatctaaatgtgccggctcaatccatctccttcgacggaatcgtagtgggagcgagaggagcagtaccagatgcaacggctgcattgtgtaccgcaatcgggctggggcgaagcgagctcgaactgatgtccctgagggccttggagggaagtcttcggattttccgactgtttatggccctctag

SEQ ID NO: 31041 - DNA, 3102 bp, Crotalus oreganus
  source 1..3102: mol_type = genomic DNA
atgttaacagacactgtggtactgaggccccctggccttccagaccccagctgtccaggtagttgccccagagtagcgtccccaaaaagtgacgcggagtgtccgaaacactcgtgtccctgtggaagcgaattcgggacgaagcgaggtcttgcgatgcatcgattccactgccacccggcagaggtaaatgcagagcgccttactacgttgcctactaagaagctcgtgtggacccaagaggagatggacggactcctcagacatgcaaacggagcatggaaagaagggatgttgaaaacgcagatattcacatccctcatgcctcacttcccaggtcgttcagcggaggcaatcaaaaagagactacaaagtctcaaatgggtcccagcacgagacaacccagagagaaactcgcaaccacttcacgctacctcagggaacgtagcacctgccacgctccccactcccgacccctcgagggtagacgaccagggggcgaacattgaagatccagctgcctcctggaggagggccctcctggcagctgcggcagaccattttaaggaacccaaattgggcgctggaacgcttaagcagatcacccaggatctgctaaacggcaagataagcagcggagaatgcagggtgctaatgggtgagcacgcccagcattggtttccacacacgtggaagccctcatcggcccggcctgagccgaaagcccgtcaatggaaggctagagagatacggagggcaaactatgcggcggtacagaaactgtacaagctccgcagacgggatgctgcacaagccgttttctctgggagttggaggaatgcgtatcggggccgtgctccacagcctgacaagatggatcagtactgggcggaagtatttgagaccgccagtgcgactgacgtaacaccaccggggtccccatcagaaatctattggtccgtggtgagcaagatcactccatcggaggtcgcagacgccctcaaaggtatgagaaatagtgctccaggactagatcgcataactgcggaggaactgctgacctgggatcatccgtcactagcagcctattacaatctaatgttggcggcaggaggcccgcctgagcatctcgcatgctccagagtgacgtttatccccaaggtggaaaacccacagaccccaggggactaccggccgatatcagtcgcgtcaaccgtcttacgggctttccacaagatcttggcatggcgcctccgagataacctccaactctcaccgttccagcacgggttcctacagagagatggctgcctggaggcaaccgccctgctccacaccatactacggaaggtccacaacagcaggaagtcatgcgctatgctgttcttggatgtcgccaaagcgttcgatacggtctcgcatcaaacgctcttccgggtagcggtggagttgggcctgcctccccccctggtgaactacctcaagtgcctgtatagtcggtccacagtaagactcgcggacaaggctaccaagtgcggaaggggagttcgacaaggcgaccctctatccccgctcttattcatcatggtcatggatgatatagtgagaaagaccctgcccgaggtgggctttgaccttgatggacaacgggtggacagtctagcttatgcggatgacctggtgctactagcagaaaagtcccccagacttcaggacaaactacacctcctgtctgaagctctgcggaaagcaggtatgtcactcaacgcgcgtaaatccagagggctcacaatcaccaaagtgagcaagcgcaaacagatggtcataacacctaccacttatgagtgcgagggcgaaccgatcaagcctatggggaccgacgactcagtgagatacctaggtctccatttcaactggaaaggcaggatcgtccccaaacataccggcaaactggactctctgctcaaagaacttacgaaagcacctctgaagccttaccaacggcttcagctactgaaattccacgcagtaccgaagttcacccacgaactggtactcgggcatgcgcatcggaacacagtaaagaagctggactgtctgacccgggcggcggtgcggaaatggctgcggctccctcaggacacccctctcgggtacctccatgctaatgtcaaagacggcggtctggggatcccatgcttctcaacctcgatcccacttctgcaaaagaaacgatttgagaagatcgcgacaaaccctgccacgatcttccagatcatgcagaggcaagattcattccggacgcaagggcgacggcttgataagccctgccgactgaattctacagtcgtaacatcaaaaacagaagtgagagaagagtgggggaacatgctctccaactccgtcgatggcagagagctaaggcacccggaggtcgacaaagccagccatgagtggctcctccgccccgaccgggtgttccctcgtctccacatgaggggcatccagttgaggggggggctgctccccaccaaagcgcgaagcgggagaggtaacaacaggcaagtcacgtcgaaaacttgcagaggggcctgccaaaatgtcgaaaccctaaaccacatactccaagtatgtgatgtgacgcacgatgcccgatgtgcacggcacaaccgggtgctccaccgcctcgaaaggctccttcacaagaagggtctccgcacaactctcgaaccggtgatcccagcaggttcatcctttatcaaaccggatctgatcatagagactgatacccaaacgtatgtcctagatgtctctgtggtggccggctataggatgacagaaagctgggacatcaaagtagagaagtacgggcgccctgatcgtgttgaagccatccgcaaatgggctgctataccggcaacaaaacgagtggaacacctgccggtcattgtctccaaccggggactctgttaccagccgtcgggagatgggctcagagcgttggggctgaccagtagagacatctcagacctctgtctcctggccatcagcggctccctcaggtgctacgacctgtacatgcgagggacacgagcggtctag

SEQ ID NO: 31042 - DNA, 3975 bp, Gopherus flavomarginatus
  source 1..3975: mol_type = genomic DNA
atgatggcggcactagcgagtgcccagctgcgcccaagtcgaagggctaattcgactattttggacacggagattgtaccttggggtaggtgcatctccagacccttcgaacccccgatgcgatatcacgtgaaagtttccactgtggctacgcagaccgatagccctggaactaccgacggggtggcactccgcaggcgggagtctacccagaccttacttaccgcaggtgagatgtatcccatcccgggaacctcacagacttccttcactgacggtgtgacaagtggtaacactttcgcacagacagaggttgaggagcccctcccgcctctacctatggagatcttgaattcggtgtttggtgagactgtgaggcccggcacatctcccagaccttgcgtaccaacaactcctgccagtgagaaggaaggagatacagaaggctccgcaacactggcagagaacattgataacagctgtgttcccactgatgcctccactgtcaccacgacagagggagatggcgagacaagggcgcagggaaaggttctggtaccactaccgcatgataatccatcatgtcccttctgtggggaccatgtgggaaaacctactgctctgaatgtccatctaaagcggcaccacggagggaaggatgttgcattccaatgtgcattatgtgggaaaatcgatccaaacccacacagcatcctatgtcatatccctaagtgcaaagggctcacactccaagtgccagctggagactgggcttgcgaggtctgtgctaaacaatttagcaccaagtctggcctctctcaacacaagaggcgagcccatcccgtggtccgtaacacagagcggattcttgccagtcaacctaaacagaactcgcaacgtgggaaacacaaaagttgttggtcggccgatgaagagttactccttctcgattttgacaaaatgtactcgggcgacaggtgcataaacaaaagaattgcggaagcaatcggtaccaaaactgctaaacaagtgagcgaaaaacggcgcttgctcaacctctacccaagggccacctccgtgaccgctgaccaaggacctggagcgagtccgcactacttggaagctcgatctgacgccccctctcccattaaggggctacattccatctatatgcgcaaagtgcaacaacgcttgtccaaagaacagcaaggacaacagcacaagggccaggaaaaactcgaatcggagattcttagcgcatgggtcgcaggggacccaaatgtcagatcactagtagaagcggcttccattgatgttctctcctccttccttgcaccggagtctgggactaccaagaaaagagcgagggccaaagtctccaaacctaaaagtggaaagggaaaatcttggatgaaaaagagggcggctaaaagaagcacttacatgagattccaacatctctttgaaaatgaccgatgtaagttggcttcaatcatccttgacggcactgaacgccttcagtgccaaattccactagcggaggtctttcaagcatataaacaaaaatgggagacgcaaacagcttttcaaggacttggccagttcaaatcccagactcgagccgataattcggcatttgacctactgataagtgcaaaggaagttatcaagaacataaaggagatgaacaaaaactctgctccgggtcctgacaaggtcagtgtgaaagatttggtccgcgtggacccagagggcgatatcctagcgggccttttcaacacgtggctggtcacaggcataataccggacggtattaagacatgtagatccctactgatcccaaaaacgatggacccagaagccttgaaagatcttggcagctggagaccccttaccatcgggtccatcgtgctgcggctattttctaggatattgacgaacaggctggcaaaagcatgccctttgaatgagcgtcaacggggcttcattgcggcacctggctgctcggagaatctgaaagttctccataccatcatgaagcaggccaaacgagacaaaaagccactgggagtcgtattcattgatatagccaaagcatttgactcagtgtctcacaagcatatcatgtgggttctacaacagaggggcctagaccagcacgtgattaacatcatttgtgactcctataggaacgtccatacccgtatggaaatagggaaggagctcacagagcctatcgctattgaggtcggagtcaagcaaggagaccctatgtcaccactgttattcaacctagcgcttgatcctctcatttcaacgctagaaatggctggtaagggattctcggtcgggacgcataaggtaacagctctcgcctttgctgatgacttggtcatgctcagcgactcgtgggaaggaatgaatgccaatatacgaatacttgagtccttctgcacgctttctggactcaaggtgcaagctaagaaatgccatggtttccaaatcaatccgactcatgactccttcacaataaacaactgtgaagcctggaagatcggggccactccactgaacatgatcattccaggagagtctgaaaaatacctgggagtcaaggtcgatccatggatcggctttacgaaacctgcattatccgagaagcttgacacctggcttgagaggatcaacagggcccctctcaaaccttcacaaaaattggcaatgcttaacaccttcacggtaccacgagtcatatacctagcagaccacaccgattgcaaacaagccctgctttccagcttggatgataagatcagaagggctgtcaaagagtggttgcacctgccagcggatacctgcaatggtctcctatatgccagatccagggatggaggactgggagtaacacggctcgctagcctcatcccctccattcaggcaagacgcctacacaggattgcacactctgaagatgctacaattcggtccatcgcattggctaatgatatcgagagtgaataccgaaaactgtggttggttgcaggtgggacccaagatactatgcctgcaataactgacgcggtgatcgttgatcacaaactgccacagcacgtccttgacaagctgaccgagtgggagaagccggctcccagggtgatatacccaatcccatgtaactggcgaaatgcggaattttcccagtggaaagacctaccatgccaaggcagtggggtgagtcactttgagaacgatcccaccagcaatgactggttgactcaccacaaagggttctccgagcgccaattcctaaccgcactaaagttgcgagcgaatgtatatcccactagggaatatctagggcgtggcaaaaccaattccatcgtaaggtgcaggcactgcagtgctccatatgagtcgctatctcatatactgggacagtgtccggcagtccagggggctcgtattcgcagacacaataagctctgtgagatactgatgcgtgaagctcgtaagcttcgatgggaaatctaccaggagccacatttaaggactgcccaaaatgaactgcgaaaacctgaccttatttttgccagagaaggaacagccctagtggtcgatgttaccgttcgcttcgaatacaaagacaagactttctcggatgctgccgcagagaaagttagacactatcaatctctaactgaggagatcagaaaactgacgggtgccaacaaagtcagttactttggacttcccctgggtgctcgtggaaaatggccggtcattaatgacagggtactctcggccctcggcctgtctgtcagcgcaaaaggaagggctgcaagactactgagtcgacgagccctcctatatacaacagacgtaataaacaccttcgagagcattggcaagggcttctcgaccccagctgagaccaagcccgatgggactccaaaacgacagaagggaatctcgtaa

SEQ ID NO: 31043 - DNA, 3981 bp, Malaclemys terrapin
  source 1..3981: mol_type = genomic DNA
atgatggaggcactggctagtgcccagcttggcccaggtcgaagggctaattcgacacatttggacactgatgtcgtaccttggggtaggtgcacattcaggactttcgaacccctggctcgatatcgaattaaggtatctacagtggctacgcagaccgatagccaccaacttaccgataatgaggcataccccactctgaagtcctcaaagacaaccattaccgaaggtgagatgtatcccatcccgggaacctcacagacacacaccgccgccggtgctatcagttgcgagactgtagcacagactgaagctgaggagatcctcccagctctacctctggagatcctcaactcggcgtttggtgagactgtggggcccgacacatctcccgaaccttgcgtcccaacaactcctgtcagtgagaaggaaagagatgcggaaggctctgaaacactggcagacggaactgatgataccatctgtgttccttccagcgcccccactgtcgtggtgacagagagagaatgcgagaatagggtgcagggaaaggttctggtgacattacctcatgataacccagcatgtcccttctgtggggatcatgtagggaaaccaacagctctctcggtccatatgaatcatcaccacggaggtaaggatgtggaatttcaatgctcattgtgcactaaggcggatcctaatgtacatagcatcctctgccacattcctaaatgcaaaggcttaacaccacaagagccagctggtgactgggcttgtgaggtatgtgccaggcggtttggcactaaatcaggcctctctcaacataagagacgagcccaccctgtggtacgaaacgcagagagaatccaagccagtcaacctaaacaaaactcgcagtgtggaaaacacaaaagttgttggtcggccgaggaagagttgctccttaccgattttgacaaaatgtactcgggcgaaaagtacattaacaagttaattgctgaggcaataaagacaaaaactgcgaaacaagtaagtgaaaaacgacgcttgcttaacctctacagaaagaaaacatctgggaccgctgactcaggacctggagcacagaaacacaatctggaagtacgatctgaaacgcccatctccactattgggctcgagaacagctatatgcgcacaattactaaccgcttaagggctaacaatcaaggacccctacgccagggccttgaaaaattcgaagccgaagttcttagcgcatgggtcgcgggggaccccaatatcagatcgcttgtagagactacttccattgatgttctctcctccttcctagcaccagaacatgagcataagcacaagcaaaaagggaacacaaggggccgcaagtcaaaaagtggaaagggccaatcctggaggcaaaaaagggcgaccaaaagaggtacatacatacgcttccaacacctctttgaaaatgacagatgtaaacttgcctccattatccttgatggcactgaacgtctccagtgcgaaattccacttgaaaaagtctttcaaacgtacaaagacaaatgggaatctcgaacaccctttcaagggctcggccaattcaagtctcatgctctagctgataattcagcattcgatattctcataagtgctaaggaagttttgaagaacatctctgagatgaacatgaactcggctccgggtcctgacaaagtcagcttaaaagatctggtccgtgtagatcctgaaggcgatacgctagcggggcttttcaacacctggttggtcactggtatcattccagacggtatcaaggagtgtagatccctactgatcccgaaaacgatggaccccgaggccttgcaggacttagggaattggaggcctctcaccattgggtctatcgtgctgaggctattttccagaatactaacgaacaggctggctaaagcatgcccaataaatgcacagcaaaggaggtttattgcggcacctggctgctcggagaacttaaaggttctccatactatcacaaagcaggctaagaaggaaaaaaagcccctgggagttgtatttgtagatatcgccaaagcatttgattcgatatcacacgaccacatcatgtgggttctgcaagaaaggggcctggatcaacacataattaacatcatcggtgactcctataggaacatccatacccgtatggaagtagggaaggagctcacctcgcctatcgcaattgatgtaggggttaagcaaggagacccgatgtctccactgctgttcaacctagcgcttgatcccctgatatcaacgctagagatggctggtaagggattctcattcggggcacaaaaggtaacagctctcgcctttgctgatgatttggtcatgctcagcgactcgtgggaaggtatgcgtgctaacatccaaattcttgagtccttctgccacctatctggactcaaagtgcaagcaaagaaatgccatggattcctgctgagccctactcatgactccttcactgtcaacaactgtgaagcctggaaaatcggtgctgatggcctgaatatgatcgctccaggcgagtctgagaagtacctgggactcaaagtcgatccgtggataggattctcaaaaccggcattatccgacaagcttagcacttggcttgagaggatcaacagggcccctctcaaaccttcgcaaaaactggaaatgcttaataccttcaccataccacgagtcatctatctagctgatcacaccgattgtaagaaaaccctactctcttccctagatgataacatcagaagggccgtcaaagagtggttgcatctaccggccgatacctgcaatagcttcctttatacaagatccagggatggaggactgggagtaacaaggctcgctagcctcatcccatctattcaggcaaggcggttacacagaattgcacactcagaagatatgacaattcggttcatcacattggctaatgacattgagagtgagtaccaaagcctgtggctggctgcaggtgggacccaagatactatgcctgcaataacagatcctgtgactattgatcacagactaccacagcgtgccctcgaactactaaatgagtgggagaggccagctcccagggtaatatacccaatcccctgcaattggagagatgcggaattctcccaatggaaagacctaccatgccaaggcagtggagtcagccactttgggaatgatcccaccagtaacagctggctaaaacatcttacagggttctcccagcgtcaattccttactgccttaaaaatgagagcgaacgtgtatcccaccagggaatacctagggcgtggcaaaaacgaatacatggtaaactgtcggcattgtgaggccccctatgaatcactttcgcacattctgggacaatgtctggcagttcaaggtgctcgcatccgcagacataacaaactatgcgagattctaacgcgagaggcccgtaagctggaatggacagtttatcaggagccacacctacgtaccagcaaaaatgaactgagaaaaccggaccttgtttttgtcaaagatggaacagccctggtggtcgatgtcactgtacgcttccaatacaaagaccagactttctctgatgctgcagcagagaaagttagacattaccagtcactgacaagcgagatcagtagacttaccggtgcaaacaaagttcgttactttggcctccctcttggcgctagaggaaaatggccaaagattaatgacagagtgctgtcagcccttggtctgtccgagagtgcacaaggacgagctgccagactgctaagtcgcagagctctcctatattccatcgatatactcaataccttctcggggattggtaagggtctcctcaactccgatgacaccaagtccgtcgggacacaaagggaacagctgggaatctcgtaa

SEQ ID NO: 31044 - DNA, 3576 bp, Eublepharis macularius
  source 1..3576: mol_type = genomic DNA
atgtccctatttctatatatggggaaccacacttccattgaacctataatgagagagacaattagtactggatatgacaaaggaaacttcctggatgtgactgatcccgttattgcggttgatcacatggtgagtaataataattctaagactgatgaaatgaccagagaggtggcaatggatggacatccaagttgttggggagctgaaggaggaataggaaatgccagttcggaaggagagggactacaggaggttgaaagtaggggaaaagatggtatagggaaggtgggcgatgataatcactcagaaaacggaagtaaggaatttgttgttgttctacctgatgataatcctgcttgtcctgtctgtggggactgctatggaaaacccactagtttgcaagtgcacatttgtaggaatcatagggaggaggatgtaaaatttggatgtaggttatgtggcagggtagatgggagagttcactccatccttgttcatatcgcaaagtgtgatgggttgagacaggaagaaaagagggtgctggagtttgtttgcgagttttgtgacagtagttatgagacacagattggactatcgcaacacaaacggcatgcgcatccagctgagaggaacgaggaaaggataaaagctagtaaagtgataaaagagtctatgagaggaaagcataaaagttgctggacagaggaggaagtgcggttgttgatggagttggaagtagaatgtaggaatgagaaatttattaataaggctattgccgttaagttaaagtccaaaacagcaaaacaaattgcagacaagagaaggttgataaagcagctgagagaggaacccccttttggggacagaatgctagcaccgcggtgtgagaaggagagtgtagatgaacttaaggaatggtatcgaatggtgtgcttgaaagaaggttataggtttaaagatcttgaaggggcgcaggaggttctggaaagatggatggaaggtaaggaggatattgatcggagggtggaggatctaactatagatcttctaataaagttcttgcccgatcaaaggtataggggggggaagaggaaaaagagaatgaaagggagggttaaacaggcctcctggatgaaaaggcgtgccaagaagagagttgagtatgcgaggttgcaggccctatttaagaacaataggcagcgagcagctgccctggtgttggatgggacgtcagggcgaaagtgtcagattgcgccctccgaggtacatcgggtgttcaagagaaagctagaagtggggcgggaatttaaaggtttagggcaatttcgtccttttggtaaggcagagaacatcggctttagagagctctttagggaggaggagatttgggacaatctgagtggaatgaaggaagggagtgcggcagggcctgatgggattacggtaaaggatatcaagcggatggacccaggaggaagattgttaacttgtttgtttaatgtatggctaattacaggttccattcctgaggcggtgaagagttgtaggtcaattcttatccctaaagtagaggacgaggaaggactgaaggagataggaaattggaggccacttaccatcgggtctgtaatacttagattgttttctagggttcttacgaagcgcttgcaggaggcttgtcctgtgaaccccaggcagagaggttttatttcggctccaggttgctcggagaatctcgaaatccttagggtagttatgaagaatgccaagttagaaggtaaacatctgggtgtggtcttggtggatgttgctaaggcattcgattcagtttcgcatgaacatattcagtgggtcctgagagagaggggattagatgaacatattataggactcattagcaagacgatggagggagctaatatgagattccaggttgctaatggtgaaacccctcggattgagtttaaagtgggggtgaagcagggtgatcccttgtcgcctgtactattcaatatagcgatggatctgttgattaatgaaatttccctctgtgagggaggttattcaattggaaaagttaatatttcaacattggcatttgccgatgaccttgctgtattgagtagggactgggcttcaatggaaagattccttgatcttgttagagtgttttgtcagctctcaggactcagtgtgcaaatgaagaaatgccatggttggtttttgagtccaagccagggatcctatgtggtgaataactgtgagagttggaagataggaggtgagtcactccacatgatggggccaggtacagagcaaaagtaccttggcattaagttggacccctggagaggtatttgtaaaatgaactcgttagagagtgttaaggtttggacgaagaggatagatgaagcccccttgaaacccactcagagaattgagttgttgaagacctatatgttgccaaggttgttgtatattgcggatcacaccgaggcatcagcagcccagcttagccccatcgatgacgtaataagggctgtggtgaagaggtggttgcacctaccagtggcaaccaccaatagtctgatctacgcccgttgtagagatggtgggctggggctgggtagactggaaatgctggtaccgcagttgcaaatgaaacgcttatacagattagcgcagtcagaggacttggtgattaatgaaatctgtcagttagggcaggtgcaaaggagatttgagaacttatggaagagtttaggcggattggctgatgaggtaccaagtatccttagggatggggaggtcggaagtaaagctccgtgccctatgcccattgattatagggacttggagtttgaaagatggagttctctagtgtgccagggcagtggtattgcactgtttcaggatgatcgtattagcaatgcatgggtaggagtgaggagaggaatgaaggaaagacactacatcactgctctaaagatgagagctaacgtggtgcctactagggagtttctaagtagaggcactcaggggcaggattgtagttgtaggaagtgcaaggctaaatacgaatctatttcacacatcttgggccagtgtccaactgtccagaatatgagaatcaagctgcacaataagatatgtgatatcctggttaaagaagcaaaaagtcagggttggatggtccaccatgagccacatttgagaagttctgagggaatattgcggaaaccggacttaatctttgtgaaagaagacagggccatcattgttgatgtgacagtgagatttgagtatcacattgatggtcttagagaggctgccagggagaaggtcaggtattactgcaatttggaagagcaggtcaagaggttgactggtgccactgatgtgctttttatgggctttccagtgggagccagaggtaaatggtataaggacaataaacgtttgttgaagctcctaggtgtatcaactgctaggtgtctttggctagccaagctaatatctaggcgtgtcgttctgtattcagtagatatgccgaatacctttttgaattcctga

SEQ ID NO: 31045 - DNA, 3981 bp, Emys orbicularis
  source 1..3981: mol_type = genomic DNA
atgatggaggcactggctagtgcccagctatgcccacgtcgaagggctaattcgacacactttgacactgatgtcgtaccttggggtaggtgcacattcaggactttcgaacccctggctcgatatcgagtcaaggtatccacggtggctacgcagaccgatagccatgaaattaccgatggtgaggcataccccactctgaagtcctcacagacaactgctaccgaaggtgagatgtatcccatcccgggaacctcacagacacacaccgccgccggtgctatcagttgcgagactgtagcacagactgaagctgaggagatcctcccagctctacctctggagatcctcaactcggcgttcggtgagactgtgaggcccgacacatctcccgaaccttgcgttccaacaactcctgtcagtgagaaggaaagagatgcggaaggctctgaagcactgacagaaggaattgacggtaccatctgtgttccttccaacgcccccactgtcgtacagatagagggagaatgcgagaatagagtgcagggaaaggttctggtgaaactacctcatgataacccagcatgtccattttgtggggatcatgtagggaaaccaacggctctgtcgacccatctgaaacgtcaccacggtggtaaggatgtggaatttcaatgctcactgtgcaataagatagatcctaacgcacatagcatactatgccacattcctaaatgcaaagggctgacaccacaagagccagctggtgactgggcttgtgaggtatgtgccaggcgatttggcactaaatcaggtctatctcaacataagagacgagcccaccctgtggtacgaaatacagagagaatcctagccagtcaacctaaacaaaactcgcagcgtggaaaacacaaaagttgttggtcggccgaggaagagttgctccttatcgattttgacagaatgtactcgggtgaaaagtacattaacaagttaattgcggaggcaataaagaccaaaactgcgaaacaagtaagtgaaaaacgacgcttgcttaacctctacaaaaagggaacatctgaggtcgctgactcaggacctggagcacagagacgcaatctggaagtacgatctgataagcccattcccattgttgggctcgagagcagctatatgcgcacagttaataaccgcctaagggaccacattcaaggacctctacacctgggccttgagaagtttgaagcggaaattcttagcgcatgggtcgcgggggaccccaatatcagatcgcttgttgagaccacttccattgatgttctctcctccttcctagcaccagagcatgagcataagcataaggaaaaagggaacacaaggggccgcaacccaaaaagtggaaagaaccaatcctggaggcaaaaaagggctaccaaaagaggtacttacattcgattccaaaacctctatgaaaatgacagatgtaaacttgcctccattattcttgatggtactgaacgccttcagtgccaaattccacttgaagaagtctttcaaacatacaaagacaaatgggaatctcgaacacccttccaagggctcggccaattcaaatctcatgctctagctgataactcagcattcgacatcctcataagtgctaaggaagttttgaaaaacattaaggagatgaacatgaattcggctccgggtcctgacaaggtcagcctgagagacctggtccgcgtggacccagaaggcgatgtgctagcggggcttttcaacacttggttggtcactggtatcatacctgatggtatcaaagagtgtagatccctactgatcccgaaaacgatggaccccgaggccttgcaggacttagggaattggaggcctctcaccattgggtccatcgtgctgaggctattttcgagaatactgactaacaggctggctaaagcgtgcccattaaatacaaggcaaaggggatttattgcggcacctggctgctcggagaatttaaagattctccatacaatcacgaagcaggccaaaaaagaaaagaagcccctgggcgtcgtatttgtagatatagccaaagcattcgattcggtatctcatgatcacatcatgtgggttctgcaagaaaggggcctggaccagcacataattaacatcatcggtgactcctataggaacgtccatacccgtatggaagtagggaaggagctcacctcgcccatcgcaatcgacgtaggggttaagcaaggagacccgatgtctccactgctgttcaacctagcgcttgatcccctgatatcaacgctagagatggctggtaagggattctcatttggggcacaaaaggtaacagctctcgcctttgctgatgacttggtcatgctcagtgactcgtgggaaggtatgcatgctaacattcaaatccttgagtccttctgccacctttctggactcaaagtgcaagctaaaaaatgccacggattcctgctgagccctactcatgactccttcactgtcaacaactgtgaagcctggaaaatcggttcagatggcctgaatatgatcgctccaggtgagtctgagaaatacctaggagttaaagttgatccatggatcggcttctcgaaaccggcattatccgacaagcttagcacttggcttgagaggatcaacagggcccctctcaaaccttcgcaaaagctggacatgcttaataccttcaccataccacgagtcatatatcttgcagaccacaccgattgtaagaaaaccctactctcttccctagatgataacatcagaagggctgtcaaagagtggctgcatctaccggccgacacctgcaatagcttcctatacacaagatccagggatggtggactgggagtaacaagactcgccagtctcatcccatctattcaggcaaggcggttacacagaatcgcacactcggaagatatgacaattcggttgattgcattagctaatggcattgagagtgaataccaaagcctgtggctggctgcaggtgggacccaagataatatgcctgcaataacagaccctgtgactattgatcacagactaccacagcgtgccctcgaactgctaaatgagtgggagaggccagctcccagggtaatatacccaatcccctgcaattggagagatctggaattctcccaatggaaagatctaccatgccaaggcagtggagtcagccactttgggaatgatcccaccagtaacagctggcttaaacatcttaaagggttctcccagcgtcaattccttacagcattaaaactgagagcgaacgtgtatcccaccagggaatacctagggcgtggcaaaaaccaatacatagtaagatgtcggcactgtgaggccccttatgagtcactttcccacattttgggacagtgtccagcagttcaaggtgctcgcattcgcaggcataacaaactctgcgagattctaacgcgagaggcccgtaagctggaatggacagtttatcaggagccacacctacataccagcaaaaatgaactgagaaaaccggaccttgtttttgtcaaagatggaacagccctggtggtcgatgtcactgttcgctttgaatataaagaccagactttctcggatgctgcagcggaaaaagttagacattaccagtcactgacaggtgaggtcagtagacttacaggtgcaaacaaagttcgttactttggcttccctcttggcactagaggaaaatggccaacaattaatgacagagtgctgtcagcccttggcctgtccgagagtgcacaaggaagagcagccagactgctaagtcgcagagctctcctatattccatcgatgtgctcaacaccttctctgggattggaaagggtctcctcaaccctgctgactccaagcccttagggacacacagggaacagatgggaatctcgtaa

SEQ ID NO: 31046 - DNA, 3996 bp, Caretta caretta
  source 1..3996: mol_type = genomic DNA
atgatggcggcactggccagtgcccagataagcccaagacgaggtgcaacctcgaccgggctgccctcgaccgggctgaatatggagatcgtaccttggggtaggtgcatcttcagacccttcgaacccctggctcggtaccgagtccaagtctcatcagtggctactcagacggagagcccgatatctaccgatggcgagagacacccaagtctggggtcctcgcagactattactaccgcaggtgaggtgtatcccatctcgggtccctcacagagaatcaccaccgccggtgcgatcagtagcgttactgtcgcacagaccgaggccgaggccgaggacatgctcccggccttacctctggagttcctcaactcggtgttcggtgagactgtgaggcccgacacatctcccggaccttgcgtcccaacaactcctaccagtgagaaggaacgagatgcggaaggctctgaatcactggtagacgatagaaacgataccatcggcgtttctcccacgacatccactgtcgcggtgacagatggagaaagcgagaccagggtgcagggaaaggttctggtgaggttaccaaacgataacccaacatgtcccttctgcggggatcatgtggggaaaccaactgctctgcaagtacatctgaaacgtcaccacggagggaaggatgtggaatttcaatgttccttgtgtgataaaatcgatcctaaagcacacagcatcctctgtcacatccctaagtgcaagggattgacgtcccaagaaccagccggggactgggaatgtgaagtttgtgccaaacgatttggtaccaaatcaggtctctcccaacataagagacgggcccaccccgtggtacgtaatgcagagagaatccaagccagtcaacctaaaccaaactcgcagcgtggaaaacacaaaagttgttggtcggccgaggaagagttgctccttatcgattttgacaaaatgtactcgggcgaaaagtgcattaacaaactcattgctgaagccatgaaaaccaagacggctaagcaaatcagtgacaaacgtcgactgctgaacctaagcagtaaaaccaaatcggagtgtgctgacccaggacctggagcaaacactcactgcctggaagtccgatctgatgagccgcctaccatcacggggctcgagagcatgtatatgcgtgaggttaagaaacgcctaagggaccaaagcaaaggaccacaacatctgggccttgctccgtttgaatctgagatcctcagcgcatgggtcaggggggaccccaatgtcagatcgcttgttgaaacaacttccatcgatgttctctcctccttcctagcacccgagcatgagactgaaggtaaagggaagaaaacggcccaaaagcccaaaagtggaaagaacaaatcttggatgaaaaaaagagcggctaagaaaagtacctaccggaggtaccagcacctctttgcgaatgacaggtgcaaactcgcctctatcatccttgatggcactgaacgcctacagtgtcaaattccacttgaagaggtctttcgcgcatacaaagacaaatgggagactcgaacccctttcgaagggcttggacaattcaaatctcatgctacagctgataactcagctttcgatcttttcataagtgctaaggaagtcttgaaaaacatcaaggagatgaacatgaaaacggctccgggtcctgatcaagtcagcttgagagatctggtccgcgtggaccctgagggcgatacactggcggggttattcaatgcatggctggttacaggtgtcatacctgacggtattaaggagtgcagatccttactgatcccgaaaacgatggacccagaggcgctgaaagacctagggaactggagacctcttaccattgggtccatcgtgctgcggctattttcgagaatactgacaaacaggctggcgaaagcgtgcccattgaatgcgaggcaaagggggttcattgcggcacctggctgctccgagaacttaaaggttctccacctaatcactaagcaggccaaaaaagagaaaaagcccctgggcgtcgtatttatagatatagccaaggcttttgactcggtatcccacgatcacatcatgtgggtgctgcgggaaaggggcctggaccagcacatgatcaacatcatcagtgactcctataggaacgtccatacccgtatggaagtagggaaggagctcaccccgccaatcgccattgacgttggggttaaacaaggagacccaatgtcacctctgctatttaacctagcgcttgatccgctgatttcaacgctagaaaagactggcaagggattcccagttgatgcgcaaagagtgactgcactcgcctttgctgatgacttggtcatgctcagcgactcgtgggaaggtatgaatgcaaacatccagattctcgagtccttctgcaaactctcgggactcaaggtgcaagccaggaaatgccacggattcctcctgagcccaacccatgactccttcactgtcaacaactgtgaggcctggaaaatcggttgtgacagcctgaatatgattgccccaggtgagtctgagaaatatttgggactcaaggtcgatccatggatcggattctctaaaccggccttatccgacaaacttgacacctggctggagaggatcaacagggcccctctcaagccttcgcaaaagctggaaatgctaaataccttcaccgtaccacgagtcatctatctcgctgaccacacggattgtaagaaggctctgctttcttccctcgatgacaagatccggagggccgtcaaagagtggctgcacttgccgtccgacacctgcaacaacttcatgtatgccagatccagggatggaggactgggagtaacaaagcttgccagccttatcccctctatacaagcgagacggttacacagagtggcaaactctaaagactgggcaattcggtacatcgcattggcgaatgacatagaggacgaatacaaaaaactctggctggccgccggcggagatcagaaggccatgcctgcaataacagagccggtggtcgtcgaccacaagctgccagaacatgtcctcgagatactgaacgaatgggagaggccggcccccaaagcggtctacccaaacccttgcaattggagagatgcggaattcgctaattgggaaaacctaccatgccaaggcagtggggtctctcatttcggaaacgacccaatcagcaatgactggctgaaacaccatccggggttctccgaacgtcaattccttacggccctaaaactgagagcgaacgtgtatcccaccagggaatacctagggcgtggcaaaaacaatcacaacgtacaatgcaggcattgtcatgcctcgtacgaatcactttcccacattctgggacaatgcccggcagtacaaagtgcacgtatcctcaggcacaacaagctatgcggaatactcgcgagagaagcccgcaaacttaaatgggttacgtaccaggaaccacacctgcacactgccaagaatgaactacgaaaaccagatctagtttttgtcaaagatggaacagccctggtggtcgatgtcacagttcgcttcgaatacaaggagaaaactttctcggatgcggcggccgagaaagtccggcactatgcgtctctgactaccgaagtcagaaagctcacgggagccacgaaggtcaagttctttggcttccctctgggcgcaagaggaaagtggcccaaaatcaacgagcaagtgctctcggccctcggtctctcagagtccgcgcaaggaagagctgcgaaactcttcagccgcagggctctcctgtactccacggacattctcaacacctttgcaggtataggtaagggactcctcaaacctgccgatgccaagcccgaagggacccccaggcgacatgtgggaatctcgtaa

SEQ ID NO: 31047 - DNA, 3738 bp, Pleurodeles waltl
  source 1..3738: mol_type = genomic DNA
atggcagggtgcgtgatagtgagaaatggcgaatcaaacgaacacaataccagatggggtagttcctggttaattaaaaccccgctcagatggcgtaagggggtgctgtctttgccacaaatttctaccctcctcaccgattttgtcaacttcactccccgttccaataacgcaatgaataacatcgaattgaatcacataacacaaaccaacacacaagatgtaatgtcagatgaggaaagcgtagacctcaaggaaagcattgagttcctaacatcgtcagccgtgaatgacactttgacctcaaaattccaaaatctgcctgatgtatatgaggtcaaagatattaatggaaagaaaagtgatttcaccaaaaaagtcactttttggaaatatcccaacgacaaattcaactgcgatttgtgcggagacataatgggcacatttaaagaactaaaaaaacacgtctccaataaacataagggattctgcctaaaaacctactgctctaaatgtgataaggaagcggaatatcacaacattgcatgccactatgcaaaatgcaaaggtagacccaaaaaaggagagctacaattcctatgtagctactgtgacctccgattcggaactaaaattgggatgtcgcaacacattcgacacgctcacccaagagcgcaaaatgatgctagattggcagctctagctaacagcaaaccttcaaaactttggtcacaagaggaaatactgctgctggcggaactagaaaagttgtatgaaaataaaagaaacattaatgcacttatggttccccacttcaccaacaaaaatagaaaacaaattgcagaaaaaagaagggatcgaagggataaaaggaaaaagcaggcaatggatgcagagcagtcatccaacaattccgataacgacgccaatgatgagcctgaaacatcagaatcaacaacaaaagaaaggcgcaaagactttatcaataaaaaaagagcgccaaaaattgcaaatttctctgaattgaacgacagaattacggaagctcagagatattcaaaaaacgtgcagcaccacgaagctgctttggtcttactagaagaaattgtaagatatatctccgaaaacactggtgatatcaacccaaggccagttccttccaatgaacaaccaatagaatctggcacagaacgtatgaatactgctgaagttgagcaaccgagcaccccaacgaataacaaaatatctaaaaaagatatacgaaataaaaatctcaataaatcgcacagaaaaagatacgccaaagcaaagggcagctataaagaatatcaggcaatgttcaagaaagacaaaaagaagattgccagaataatcactgatggtgcggaggatgccacctgccaaatcagtgctgacgttatctttgaatattacaaaaatatcattgagactgaaaacaagaaaaatcccaaattccaacaaattgacaggataccggaagagtgggatttcgaaaatttatgccaagatatttcactgcgtgaagttacccgtgcgtttgaggaatcaaatctaaataaagcagtggggcctgacaatatcggcctgaacgatctattcaaagtgcataacaaagaaccaagaatgctgcccaaaatcttatctacttggttaaatatgagaatggtcccagactgtatcaaaaggaatagatcaattctcatacccaaaaatgtaccaattgaagaacttgataaaataagcaattggcgaccaatcacaattggtacagcattcatgaagctcttcactaaaatattaacaaaaagactggacttcttcgtaaacctcaacacaagacaaaagggcttcatgaaagtcagaggatgtctcgaaaatctaacactattacaaaatattatcaaaggggctcgaaaaaacaaacactcacttgcagtggtattcattgacatatctaaagctttcgattctgtcagtcatggacacatcatacggagtctcgaaagacacagagttccgtcatctataagagatctcattaaagacttatacactaactcaaatacctctttcaagggcaaaaataacatctcaacgcccgaactcacaatgagatctggagtaaagcaaggcgactcactttctccattgttgttcaacattgccatggacccgctgatttgtgatcttcaaaaaaacggtaaaggctttacttttggatctgatggaatattcgagcaaatcaccgctctagcctttgccgatgacattgcagtactcagcaatacttgggacggaatgagtactaacttgaaaataatagaaaaattcagcaaaaccacaggtcttaaattgaatgtaaagaagacacacggcttcctcataagccataataaagacaaaatcctggtgaataattgtaaaccatggcaattcgacaaacaaaacatcgaaaatattcatccaggtgaaagtgagagatacctcggattgaactttgacccacacactggttacactaagaacagcaaggctaatgaggttctaacaagttgggctgaaaaacttgacaatcttccattaaagcccacccaaaaagtcgagattttgtgccaatatctgatccccaaaatgtcattcaaactagaaatgacaggcacagaagccaaaactctcaatataatggatcaaacaattaaaaaatatgtcaaactgtttctacatctacctgcatacacttgcgacggcctcctatattcgaaaagatcaaatggaggcttgaacgtacccaagctatgtacagcaattggaataaacaaagtaaacaatctcctctatctcagagaaacaccagacttgtacatagctcactcatatatgtatgcaggcgaaataataaatgaaaaaatcgatcaaacaataaaaacacacaaactcaatattttagacagtagttgtttgagctatgatttacaactacttgccaaatacgattggaggaaggaagaatttgacaaatggaaaaaccttcccgtccaaggagatggagctaagtacctagaaaataatccaacttctaacttttggattaggaaacattcaaaactaaaagaaaatcagtatattgctgcgttgatgctaagatcaaatgttctacaaaccagagaaactataaccagagggagaaatcgaacattttcaacctgcagatactgcaaagatgtgtgtgagacaattgctcacatatcaggtacttgtcccaaaactaaggacataagaataaaaaggcataataaaattctagagttattgatcgatagagcaaaaagatgtggttggatgacatatagagaacctcatattaagaacaatcaaggtgaactcagaaaacctgacgtagtattcaccaaaaatggaaccgctgtagtgattgatgtctcaattcgatatgaaaactcacataattcccttgaaattgcatttgaggaaaaagtgaattactacaaagagttatcacaacaaataaaagatctcactaactgtaccgatgtcaaatttcatggtttcatcataggatgttgtggtatttggcccaattgtaatgatgtcgctctggctgacctgggacttcaaatgtctttcccatttaaaaagaatgtttgcctgactactttaatggacactctaaaaatgtgccaagtattcatggacaattaa

SEQ ID NO: 31048 - DNA, 3144 bp, Aspidoscelis tigris
  source 1..3144: mol_type = genomic DNA
atgggaggggtctctctgctggttacgataaacaaaaagaaaaattcgcctggtccctccggacttcaggctagcagcagaaacaatgaagttgcaggtgctcccggcgctcctgcccccccctctgacagttttgactgctcctgtggtcgagtgtttccatcaaagagaagtctagccatgcacagattccaccggcatgcagaagaactgaatgaagaacggtccgcacgccttcccacgaagaagctcacgtggtcgaaggaggaagatagctctctggtgcgccacgcctcccgactctgggccccgaaccttctaaagaaacaccttctggacctcctagcacctctcttccctggtcgttcaacggaatcaatcaaaaaacggctccagattctcaagtggctccctcccacaacaccgacggaggcatcctctacctcctcccaagacgccacctcttcctccacccaaaatgccacctctacctccaaccaagaagccaccatccaagattccacaccgacaccctcgtggagagacgacctcctcgactttgctgtgaaaaacctccaagaaccaaaactgggatcagatgacctccggataatcgcctcagaactccaatccggcacaatctcatgcgccgacgccgcccaactgctagaagatcatgccagacactggtttcctcacacctggaagccatcaaaagagaagcaccactccctggacccctccgcctcaaagaagcaggttcgaagagcgaattatgctgcaatccagaggctttatcatcttcggaggaaggatgcagcttcctgcgtcctctctgggaagtggagacgggcccatcggggccccacggcgaaagttgacggcctggatgagtactggtccgaaatcttcgagctaccatcagcccccgatcattgtgtgacggggccctcgaaggacaaggactggtccttgctgggcgtcatctccgccgcagaggttaccagtgctctgcgcgacatgggcaactcagccgctggcctcgacagactcactccatccaccctcctcacttgggaccaaccgtcaatagccgccctattcaacctcatcctcgccaccgaatcagtcccaagacacctcgccaagtcacgggtaatcttccttccaaaatccgaagatccagccagcccttcggacttccgtcccatctctatcgcctctgttctactccgcgcactccataaaatcctggcaagaaggatcacctcgacactcaagttctcccagctgcagcacgccttcctcaagcgagatggctgcctggatgcgagctccctcctccacgccgtctttcgaaaggtccacgacaaccgagtccctgtctcgatggtgttcctggacatttccaaagcattcgactcagtctctgtgcacacacttctccgggtagccaagtcatcgggtctccctcccccgttgactaactacctggacagcctatacgaccggccctgtgtccaactagagtcgagaacatccatctgtggacgtggagttcgccaaggtgatccgctttcaccgctactgttcatcatgacaatggaagtcctccttcaatcctccataccagaaatcggctttgacctggacggcaaccacatcccggccctggcctacgcagacgacctggttttgttcgcagagaaaccagagagactgcaggagaagatcaacggcttgtttggctccctctcctccgcggggatgacaatcaacgccaagaagtcaatgggcctgaccgtcgcgaaggacgggaagcacaagaccatggtactcctcccacatgcgtacatgtctggctcaacaccaatcagacccatgggcccatccgacaccacccgatacctgggcctggagttcagttggaaagggaaggtaacacccaagcacacttcgaaactggaccagatgctacaagagatatccaaagctcctctcaagccctaccagcgcttggatctgttgaagaactttgctattccaaagcttacccatgaactagtcctgggcaatgctcatcggaatacgctgaagaagctggatgtccttgtccgtgcgtccgtacgaagttggctacgccttccgaaagatactccactgggctatctgtatgcgcatgttcgggatgggggccttggtctcccgtgcctccacacatccatccccgtcctccagaagaaccggtttgccaaactcctctccaaccctggttccatccataaagcaatcaccagccagaaatcattccgcgttgtccagagaagaattgatctcccagtcacgatcggcggccaccttgtccagtccaaaaaagatgccagggctgcctggctgaatgacctcaagcgaagcgtcgacgggaaagacctcttcggggaccctatcgatccggtcagccaccgatgggtctcacacccccaacgagttttccctcgcctccacctccgggggatccaactacgagggggtctcctcgcaacccgtgcccgcaacgccagaggtcgcaacctggacggaacaccgaaaacctgcaaaggcctatgcggacaaaccgaaacaataaaccacatcctccaagtctgtgacagaactcatgacgcaagatgtgccaggcacaacagaatcgtccaaaagctacagcggttcctacggaagaagaaaatcccaacatgggtcgagccaatgattccttctggccactcttacatcaagcccgacataatcgctactatcaacaacgaactcctggtgatagacgtctcaatcgtctccgggcctcggctcagcgaatcttggcaactgaaatcctccaaatacgggtccagcacaaatactacagccatccaagcctggcacggttcacccatcacagtccgtcaagctcccttgatcatatccaaccgcggtctgctattcgcccaatcaggtcaggcgctaagatccatcggccttacatccagagatatgaccgacctgtgcctactagcaataatcgggtcattgaaatgctacgactcctacaccagatcgacacaggactacaaactgcagaggggcgggcaacacgccgggaacagttaa

SEQ ID NO: 31049 - DNA, 3273 bp, Aspidoscelis tigris
  source 1..3273: mol_type = genomic DNA
atggagacgactctcgtctccatccgagctaagatccaggccacccccctcctctgggctaaccaccctctggagggttttctgctggttatgaaaagaaaagaaatgacttcccctggtccctcaggaccccagggtaacagcagagataacgatgctgtaggtgttcccagtattcctgcatgcccacccggcgatttcacctgtccctgcggccgaacgtttccatccaagaggagcctggcgatgcaccggcaccacagccacccagccgaggtcaacgaagaacgtaccacgcgccttccattgaaacgcctcgcctggtcgcaggaggacgacagtgctcttctccgccatgccacacgcctatgggccccgagccttttaaagaaaaaacacctcgagcttctggctcctctcttcccgggccgatcggttgaagctctcaagaaaaggctccagatcctcaagtggctccctccaccacccccggaaacagtgagctcccctgggaccactccaacaatggtctccccacctgcgttcatccgctctccagaaaccccaacaattgtctttccagacacaccgtcaatggtctttccagacacaccaacaatggtctttccagacacaccaacagtggtctttccagacacaccgacgttggatgtccaagaaacccaacctccgacatcctcctggaaggtcgacctcctcgatttcgcggccagaaacctccgtgagcccaagatgggggcagacgacctattgaacatcacctccaaactccagtctggcaccgtctcccagtctgaggctgctcatcttctgaatgaacatgcaaaacgctggtttccgcactcctgggccccatcgaaacgcactcaccgctctctcggtcccgctccgtcgaacagacagcttcgacgagccaactatgctgcagtccagaaactttaccaccttcggaagaaagacgccgcctcctgtgtcctctccggccagtggaaatctgcacaccgtggctccaaagacacgattgacggtttggaagattactggtcgcagacctttgaacatccctcagccactgaccctcgcgaccccaggacgcctgaagatacagcttggaccctattggacaccatcaccgcggcagaagtcaccagcgccctgcgagatatgggcaactccgcggctgggctggatcgactcacccccgccacactgtcctcctgggaccaaccatccttggcggcgtacttcaacctgatcctcgcaactgaatccgttccgaaacatatctctaaatcaagagtcatcttcctaccaaaaacagatgaacctaccgccccctctgactttcgcccgatctccatctcttcggtcattctccgagcattccacaagatcctagcacgtagaataacttcaaccttacagttctccaaactgcaacacgccttcctgaaacgtgacggatgcttggaagcaagctccctccttcatgccatcttacggaagatccacgaggaccgtactccagcctcattgatcttcctcgacatctcgaaggcgtttgactcggtttcaatccacactctcctgagggtggccaaatcatccggcctccccccaccgctgacgaactacctggttagcttatacgatcacccccgtgtcaaactggaagcaagagaagttacctgcggacgaggggtccgccaaggcgatcctctttcgcccctgctgttcatcatggccttcgaggacatcctgcaatcagctctgcctgacataggctttgatctggacggccacaacattccggccctggcctacgcggacgacctggtcctgttcgccaggaggcctgagagactccaggaaaagctcgacatcctggttgactccctggctgccgcgggaatgtccatcaatgcgaagaagtcgatcggcctgaccatcgcaaaggacggcaaacgcaaaacaatggtcctcctaccacacatctacagatccggttcaaccgaaatcaaaccattgggaccatccgacgtcacccggtaccttggcctggacttcacctggaagggcaaagtatctccaaaacacacctccaaactggaccagatgctgttggagctaaccagagctcccctcaaaccataccaacggctagacctgctgaagaactttgccatccctaggcttacccatgaattggtcttgggtaacgcccaccgcaacaccctcaagaagttggatgtgctaatcagatcggcagttaggtcctggcttcgtctccccaaagacacacctctgggcttcctacacgctcacatccgtgacggtggcattgggctaccgtgcctcaacacatcaatccctatactccaaaggaaccgttttgcaaaacttctctcaaacccggaacccatccagaaggtcgttgccaatcagaaatcattcagagtaatacaacggataactaaccgaccggtccaaatcggcaatcacatcatacaatccaagaaagaagccagaacagcatggaaaaacgagctccgacggtcggtcgacggaagagacctctttggcgacccagtagaccctgtcagccatcgctgggtctcccacccgcaacgagtctttcctcggctccacctccgagggatccagctgcgcggaggcctcctcccgaccagaacccgcaacgccagaggccgcgatcccccggtaacatcaacttcctgtcgtggtttgtgtggccaggccgaaaccttgaaccacattcttcaggtttgcgacaaaacacacgacgcaagatgtgccaggcacaacagaatcgtccatcgcctgagccaactcctgcgaaggaagaatgtcccatgctggattgaaccaattatccctgcaggtgcaacatacatcaaaccggacatcatagcgaaagtaaacaacgaacttctcgtcatggacgtctctgttgtctccggttcccggctgaacgagacatggtcaatcaagactgagaagtacggctcctccaagagttccaccgctctccaatcctggcatggttcacgaatcccactccgccactaccccattatcatctccaaccgagggctcctgttcgcacaatctgggcaagcgctacgctccatcggcctctctgcccgtgacctcactgacatctgcctgcttacgatcatcggctccctgaaatgctttgaccattacaccaggtcgacgttggacctctag

SEQ ID NO: 31050 - DNA, 3849 bp, Mauremys mutica
  source 1..3849: mol_type = genomic DNA
atgccccaggcacgggttagtttccccctggtaagggttagcttccccctgagaagggtaaatcttggagacatggaaaaaagtaatttttatttaaataccggagtggcgctggaccgggttaaaaacgcccccgctgccggctttgatgccccggccggcagtgtaaaatatattaggggagtgattagaattactggaccaatgaccaaagctgaggggacagaaatgatgcctcaggcggctgaggttgaggatatggtcccctctgtggaggagagaattatggagggtgaagaggaggattttagtaagaaccaagtggatgaaattttaactattttgcccatggtttttactggggaagcttttaatgatttaaaaaaggatgaagtcaatctggattttaagtatttaagtaaatttgaggacccatattttatagagcctggaggctgttattctgttttaatgagaggttttaatgtgaaagttaattcaatccccttagatggggatttgaataggggttttaatgaggatttagtgaaaggagcaaaagtgatagagagtagctcctggaaagagggtgttttttacttagaatatccggtagactgttttaattgtcctatctgtccccaagttttagctacatttggaaaatgggctaaacatattaatgtagtacataagagtaaagcgatacgtgtgctatgtaagaaatgtggtaaagcttctcagtatcatagtattgcttgccactaccctaagtgcagacccagggaagtggataccctgtctgggagtcatgcctgttctgcctgtgggcttgcattccacaccaagtctggccttagtcagcactgtagacatcgacacccggctattaggaatgaacagcggattaatgagaaggttaggaatagaattaaagagagttcagctcgagttcgtatatggactgaggaagagattgagcaactgatagtactagagaggaaatatattgggaagagaaatattaataaatgtatagaaagtgaattaaaaactaagactaataagcaaattgcggataaaaggagagagttagccaaaaaaaagcaggagacagctcagatagaggaaatagaggtagagaagattgtggacagtattttagaggttcctccacctagagaaaggattttacccctgagaagggaccccgaagttgatcctaggggattagttagtaggtggggaaagcaaagtagggagggcaaagacatactgaatggtttgagggtagttgaggaattacttcaggaggattcgactaagaggttaggatgggcagaattggagaagatatgtatttctttggttgatggaaggaaattaggagaggatgaacaggttgagactaggattgaaggtagaaggaggaagggaataggtaagggtaagaaaaagcagtctaatgctcttaggagatatgcaacgcagaaggcaaaatataggttctaccagcagttgtttgataaagatagacggagattagctcggattattatgggagaaccagacaaggtgaattgcgaaatccctatggaggagatagagaggtattttatggatattttgggaaatattggacatggcaatattgtggggtggccctcatccatggagagggcggataatgatttattaatgagtccgatctccgtggatgaggttaggagtgttttgagagaaattaagaaagatagtgccccaggtccggataaggttaagataagtgatttgagggaaatttttaatatagactccttaatcatcactagaatttttaatatttggtttttaaatgggcaggtccctgatgtttttaaagaaaataggactattttaataccaaaaacagatgatgtggaagagttgaagaaattgacttcttggagaccacttacaattggatcagtgtgggtcagattatatactaagatattagcaaaaagattgtcggaagcagtgaggatttgtgataggcagaagggatttatagctgctccaggttgtgaggagaatatagctatattggacaatttgataaagggagctaagcgaaaaggtgaagaaatagctatagtttttattgatttggctaaggcatttgattcagttggtcatgggcatataatagccggtcttaaaagatttgatgtggatgaacgttttattggaatagttagggatttgtattttaattgcacgactagggtttgggttggggataaatttactgagtctattttaattagaagaggggtgaaacagggtgaccctttgtcaccgattttatttaatattgccttagatccgtttttaactagattggagttagaaggtagtggttttactgtacaaggacagagtatcacgtcactggcttttgcagatgacgtggcgattttgagtggttcgtatttaggtatgattaagaatttgagtattttgcagaatttttgtagaaataccaatcttcggataaatgttagtaagacaaaggggtttcatatttggccaaagcataaaacttatttggtgaatcctaagagtagatggatgatagggaatgaggaaattcagtatgtgatgccaggggaatttgagaagtatctaggggccaggattgacccctggattggtataggtgggtccctgcttaaggagaagttggtgaaatggagtgagagcttgagcaaagctcccttaaaaccagcccaaaagttgctgattttacaaacatatgttttaccaagattattttataatttgcttttaatggaacctccattttgtgttttaaatgatttagatgttttagtgaggaaaatagttaaggagattttacatctgcctcaatgtaccacagatgggctgttttattcaaggaggagagatggagggttagctttgactaagtttagtgttcagatcccaaatatgttgctgcggaaatggaggagacatattgtctcaaaggattcttgggttgatttatcttatgtgtatgctggtgagaatttggtagataaaattattgtatttagtgcagcgacccctcacccacgaaaatggagggaggaggagtttttaaggtggactgagttgcgatgccagggaattggggttaaatattttaggaatgatgttacaagtaattcaatttttagaaattcggataagattaagtcctcagtgtatattgcggcattacaaatgagggcgaatatatatcccacgagagaaacattggctagagggagaggaggagttactgccctctgcagatggtgtgggaaggttaaagaaacgattcctcatatttcgggccaatgctataagacaaaggagatgcgtattaaacggcataatagggttgtttctgtgttgatagatagggtggttaaagtaggatggaaagctgttgtggagccccatttaaggaatgaaaagggggagttaaggaagccggatatcgtattcacgaaaggagatacggcagtagtagttgatgtcacagtgcgctgggaggataatgacgggagtttggagcaggcccataggcagaaggcgacttattattctgaattagagaacaacattaaggaattgacgggagttaataatatccacttttttgggtttgtgattggggtgcgtggcaagtggagtgatgggaatgatgagttgctacaaattttgggaattgatagggggaaaaattttaaggaaagtgtaagtagattggttctttactccacaattgatatgatggcagtattcagtgacaggtaa

SEQ ID NO: 31051 - DNA, 3978 bp, Mauremys mutica
  source 1..3978: mol_type = genomic DNA
atgatggcggcaccagcgagtgcccagctaagcccgtgtcgaagggccaattcgacaattttggatacggagattgtaccttggggtaggtgcctctccagacaattcatacccccgatgcgatatcgagtgacagtctcctcagtggctacgcagaccgatagccctggaactaccgatggggtggcacctctcacccgagagtccacccagaccttaactaccgcaggtgagatgtatcccatctcgggaccctcacagacttaccgaaccgaaggtgtgatcagtgggaccactatcgcacagactgaggactgggagcccctcccgcctctacctctggagttctcgaattcagtgtttggtgagactgtgaggcccgacacatctcccgaaccttgcgcaccaacaactcctgccagtgagaaggaaggagatgcggaaggctccacaacactggcagacgaaatcgataataacaactgtgtttccaccgatgcctccactgtcttgacgacagaaggagatggcgagacgagggcgcagggagaggttctggtacaactacctaacgacaatccagcgtgccccttctgtggggatatcgtaggtaaaccaacagctctgcatgtccatctcaaacgtcaccatggagggaaggatgttgcattccaatgtgcattgtgcgggaaaaccgaccccaaagcacatagcatcctatgtcacatccctaaatgcaaagggcttatactccaagtgccagctggagactggccttgtgaggtgtgtgctaaacaatttagcaccaagtctggtctctcccaacataagagacgagcccaccccatggtacgtaacgcagagcgaattgtcgccagtcaacctaaacagaactcgcaacgtggaaaacacaaaagttgttggtcggctgatgaagagttactccttctcgattttgacaaaatgtacacgggcgaaaggtacattaacaagctcattgctgaagcaatgaaatccaaaactgctaaacaagtgagcgaaaaaagacgattgcttaaattatacccaagggcctccgctgagaccgctgaccctggacctggagcaacctcgcactctttggaagctcgatctgaagtcccttctcccacagaggggctacataccacctatatgcgcaaaattaggcaatgcttatccaagcagaagccaggaccagaccaccagggccttgcacagtttgaaactgaaattcttagcgcatgggttgcaggggacccaaatatcagatcactaatagaggcggcttccatcgacgttctctcctccttccttgcaccagagtctgagcctaaaagcgataatgggaaggccacagtctcgaaagctaaaagtggaaaggaaaaatcctggatgaaaaaaagagcggccaaaagacacacctacctaagatatcagcatctttttgaaaatgatagatgcaagttggcctctatcatccttgacggcactgaacgcctacagtgccaaattccactggaagaagtctttcaagcttataaaaagaaatgggagacccagactccctttcagggacttggccagttcaaatctcagactcaggcggataactctgccttcaatactctgataagtgcaaaggaagttattaagaacataaaagagatgaacagaaattctgctccgggtccagatagggtcagcttaaaagatctggtccgcgtggacccagagggtgacattctagctgggcttttcaacacgtggctggtcaccggcatcatcccagacggtattaaaacatgtagatccctactgatccctaaaacgatggacccagatgccttgaaagacctaggcaactggcggcctcttaccattgggtccatcgtgctgcggctattttctagaatactgacgaccaggctggcaaaagcgtgcccattaaacgagcgacaacggggctttattgcggcacctggctgctcggagaacctaaaaatcctccacacgatcatgaagcaggccaaacgggagaaaaagcccctgggagtcgtatttgtcgatatagctaaagcatttgattcagtatcacaccaacacatccagtgggttctacaacaaaggggtctggaccagcacgtgataaacatcatatgtgactcctataggaacatccatacccgtatggaagtagggaaggagctcacagagcccattgctatcgaagtcggagttaagcaaggggaccctatgtcaccactgctgtttaacctagcgcttgatcctctcatttcaacgctagaaatggctggtaagggattctcggtcgggacgcaaaaggtaactgctctggcctttgctgatgatttggtcatgctcagcgactcgtgggaaggtatgactgctaatatcaaaatccttgagtccttctgcacactatctggactcaaagtgcaagctaagaaatgccatggattccaagtaacccccacccatgactcattcacaatcaacaactgtgaagcctggaaaatcggggcagacacattaaatatgatcattccaggagagtctgaaaaatacttgggggtcaaggtcgacccatggatcggctttgccaaaccggcactatccgaaaagcttgacacttggcttgagaggatcaacagggcccctctcaaaccttcccagaaattagcgatgttaaacaccttcacagtaccacgagtcatctacttggctgaccacaccgattgtaagatagcccacctctccaccctagatgataaaatcagaagggctgtcaaagagtggttgcatttgccggctaatacctgcaatggtttcctgtatgccagatccagggatggaggactgggagtaacaagactcgccagactcatcccatccattcaggcacgacggctacatagaattgctcactctaaagatgaaacaatccggtgcatcgcattggctaatgatatcgagagcgaataccgaaagctgtggctggctgcaggtgggaccctagatactatgcctgcaataacagacccggtgatcatggatcaccaattgccacagcacgtcctggaacaactgaccgagtgggagaagccggctcccagggcgatatacccaatcccatgtcactggagaaccgccgaattctcccagtggaaaaatttaccatgccaaggcagtggtgtgagtcacttcgaaaatgatcctaccagtaatgactggctgactcaccacaaagggttctcccaacgtcaattcctaactgctttaaaactgcgagcgaacgtatatcccaccagagaatacctagggcgtggcaaaagtaattccatcgtagggtgcaggcactgcagcgcatcatatgagtctttgtctcatatcctgggacaatgtccggcagtacagggggctcgtattcgcagacacaataaactctgcgacatcctaacacgggaagctcgtaagcttcaatggacaatctataaagagccacacctgcgaactgccgacaatgaactgcgcaaacctgaccttatttttgtcaaagaaggaaaagctctggtggtcgatgtcaccgttcgcttcgaatacaaagagaaaactttctcagacgcagcagcagagaaagtgagacattaccaacctctaacagaggaaatcaagaaactgactaatgccagcgaggtcagttactttgggctcccacttggtgctcgtggcaaatggcctaccatcaatgagagggtactctcatccctcggtctgtcagagagcgcgcaaaaaaggacggcaagactacttagtcgaagggccatcctttactcgacagatatactgagcacatttgaaagcataggtaagggcctctcaaacccagctgatgccaagcccgaagggactccaaaccgacagaggggaatcttgtaa

SEQ ID NO: 31052 - DNA, 3804 bp, Xiphophorus hellerii
  source 1..3804: mol_type = genomic DNA
atgaacatgatgcatacaattatgaccggccaggaccacccttctggcgtatcaaaacgggtgccagtgcggctagggacggggtcgacactgcgatggcgaagctgtcccgcctgcttgtttgaggttgggcacgtgtggaactggcgaatcaacctccccagtgggcgctgggaccagcctctggggggattgtcgagggtccccaccgggactggggctacggcttccagtccacctttgttgcgcggaaagtccgtatcggtcggtactcaggttcaggagagcgactggcttatgcttcctgaggaatcctcggtggtgaccgaatcaatggcggaggctgccccggaaatgagggtagaggcagccgaagtcgtgctggcgccacaacttggacaggtcgtcggagcgatgtatacactgccggaggttgttggcgatgactctccgagagtacgggcggttgctctcaatgaagtcagggtcctcttgccgtggcttgcatcggactgcccgctgtgtggtgtgcaggtgaagggcatcgtcgcgctgggtaagcactttgctatccggcacgggggtgttactgccttgtacgtgtgcggcaggtgcgggaggtctagcagcagcaggcactccatctcctgtcatgtgcccaagtgcggggggggcatggcaacggcgggggtggagggggagcagcctagcgggttcgcttgcgatctctgcgaagcacggttccccacgcctgttggtgtctctcagcacaagcggcacgcccacgcagcggagtggaatgaggtgagactggcaaagaggaaggtgccaggtggagagatcaaagcgacaaagctctggagtgttggagaaatacagacgctcatccggctcattcgggagcacggagactcggttgccacgtaccagctcatcgctgatgaattgggaaatggcaagacggccgaacaggtgaggagtaagaggagaaacctgaagatcgatatggcaggcgatggcccacacgaagctgaggaggaggactgtcaccccgtgacagagccgatacctcaggctgtgcagtcttcggcaccgtcacctcaggtcatgtcatcggacatgatcagggaagcgttggctagttggggtgacagggagggtggcgaggaggtgagggccatcgctgctttggttagggatgtagatcagaatcctttgctgatcgaatcctcagcatccgatctcatctcgaaactgggtgggggagtggaacggaccagtagggcgcctcctcccgtccgagagcagaaccaagcgaggggttgggcaaggcgtcttgcccaacgtaggcgtgagtaccgagagtgccagttttggtattcgagggaccaggccaggctcgcggcacgcatcctggatggtgccgagagccaggaatgcgccataccggtggaccagatctacgaagcgtttcgtgagagatgggaaggcggtgggcagttccacgggcttggggagttccggacggacgcagtcacggataactgggagttctacaaacccatcctggcggtagaggtgatggagaacctaaccaaaatggaaaacggcacggccccgggcccagacaggatcagcaaaaaggctttgctgaaatgggatcctcggggtgagcaactggcacggctattcacggcatggttgatccgtggagtcataccccgggccttcaaggaatgcaggacgacattgctaccgaagtccaccgacatcggtgagttgcaggacgtcaacgggtggcgcccggtgaccatcggttcgatggttctgaggctgttttcgaggattcttaccatgaggatggcgcgtgcgtgtcctctgaatcctcggcagaagggtttcctggcctcctcgagtggttgcgcggagaacctgttgatgctggatgagatcatcaggcgctcgcgggaggacgggagccccctagcagtcgtttttgttgactttgcaaaggcctttgattccatagcccatgagcatatcctgagtgccttgggtgagcgccgggtcgaccctcatgtcattgagttgattcgaaactcatatgtggattgcgcgaccagggtgaactgtgtgggcggccgcacacagctaattcacatgaacctgggtgtgaagcagggtgaccccatgtcacctctgcttttcaacctggctatggatccccttatccatagactcgaacaggccagatttgggatacgatggggagagcaaactacggatcaccttcggggagatcgcgggttctccacgttggtattcgcggacgacttggtcttggtggcagggtcggtggaggcaatgcatgggagcctcgggatcttggaagaattttgccaactgacggggctgagcgttcagcccaagaagtgccacgggttttacatggacaagggcgtggttaacggctgtgaagcctggaggatcggtggaacccctatccacatgattcctccgggggaatcagttcgttatttgggtgtccaggtgggcccggggcgcggcattatgacgccggatcttatcccgatggtgcgaaaatgggtaatgcggatctcggaagctccattgaagccctcacagcgtctgaggttactgaacgcatttgctattcctcggcttatgtaccaggctgatctaggcaaggtaccatcaaccaaactatcccaaattgacgggttagtccggaaggcagtgaagcagtggttgcatttgcccccgtcggcgggcaacgggctactgtattcaagggttcgtgatggaggtttgggaatcctccggctggaaagactaataccgtcgatacaggtgcgacgcctgtatcggatgtccaggtcacccgacttttggacgcgtaccctgacgacacacgccgtgtcgcaatctgactgggagagactgtggaccaaggccggtggtgatgcgggtagcgtgcctgtaatgggcactggggaagctaacccggccgatgcagggagtccgccagtctaccccgactggcggcgcggtgagaatctcgcttgggcggccctggaggtccaaggtgtgggcgtagaccagttcagaggggacaagatcagtaactcgtggattgccgaccccaccgctgtgggattccggcaacgccattggattgctggcttggccctgaggacgagtgtataccctaccaaggagttcctggcgcggggaagggacaaggcaggagcagcctgcaggcgttgcctggcgaggcttgagtcgtgttcgcatatcttgggccaatgtgcctgggtgcagggcagtcggattcggaggcacaacaaggtatgcgagctcctggcgactgaggcggggaggtacggctggacggtgaccagggagttccgcgtggatgggcctgagggcggcctcaggatccccgacctggtttgcaagaaggacgatacggtactcgtcatcgatgtcaccatccgctatgagctagatggcgacactctggctcgggctgcatcggaaaaggttgcacattatcaaccagtcgcagcggagattgcgagaaggatcggagggcgttgtgcgaaggtcctggggttccccgtggggtcacggggaaagtggccttcaagcaacaacacggtgttgagggagttagggatcccggttggtaggcggagggcgttcgcccgactggtgagccggaggactctgctttactctttggatgtattgcgggattttctgcgtgaaccggaagggtga

SEQ ID NO: 31053 - DNA, 4053 bp, Gambusia affinis
  source 1..4053: mol_type = genomic DNA
atgcaaggaaggggtggtctaatcagccacctctggtatatcttgattacagacacgatgaaagttccaatagtagtatacggccaggatcacccttctggcttatcaaaatgggtgccagtgcgactaggaacggggtcgacactgcgttggcgaagctgctccgcctgcgtgcttgaggttgggcacgtatggaactggcgaatcaacctccccagtgggcgctgggaccagcctctgggggagttgcctagggtccccaacgggactggggctacggcttccagtccacctttgcccatgagaaagaccatatcggtcgctattcaggtccaggagagtgactggccgatatgtcctgaagtgccctcggtggtttccgaatcaacggcctatgctggctcggcaagaagcgtagagtcagtagaaggcgcgcgtgagccacagcctggagaggtcgatgtggtgtccgaatcaacggcctatgctggctcggcaagaagcgtagagccagtagaaggcgcgcgtgacccacagcctcgagaggttgaggtgcaggagagggactggccgatacttcctgaagagccctcggtggtctccgaatcaacggcctatgctggctcggcaagaagcgaagagccagtagaaggcgcgcgtgagccacagcctggagaggtcgtcggagcggtgtatacactgccggaggttgtgcgcgctgattccccgagagtgggagctgacactctcaatgaagtcagggtccttttgccgtggctcgcttcggactgcccgttgtgtggtgtgcaggtgaagggcatcgtcgcgcttggaaagcattttgctatccggcacgccggtgttactgccatgtacgtgtgcggcaagtgcgggaggtctaacatcagcagacactccatctcgtgtcacgtgcccaagtgcggggggggcgtggctgcagcgggggtggagggggagccggctagcgggttcgcttgcgatctttgcgatgctcggttccccacgcctgttggtgtctctcagcacaagcggcatgcccacgcagcggcgtggaatgaggtgagactggcaaggaggaaggtgccagggggggaaatcagggcaaccaagctctggagtgttggagaagtacagacgctcatccagctcatccgggagcatggagattcgattgccacgtaccagctcatagcggttgagttgggaaatggcaagacggccgaacaggtgaggagcaaaaggagactcctgaagatcgatatggccggcgattgctcgaacatagctgaggaggaggactgtagtctgtcagatccaatacctcaggctgagcggtcctcgccaccgtcacctcaggtcctgtcatcggacaggatcagggaagcgttggtcggttggggtgacagggagggtggcgaagaggtgagggcaatcgctgctttggtcagggatgtagatcagaacccttttctgatcgaatcttcagcatccgaactcatttcgaagctaggtgggggagtggagcggactggtagggcccgccctcccgttcgtgaacagaaccaagcgaggggttgggtaaggcgtcttgcccaacgcaggcgtgcgtaccgagagtgccagttttggtactcgagggaccaggccaggctcgcggcccagatcctcgacggtgccgagagccaggaatgcgccctaccggcggaccagatctacgaagcgtttcgtgagagatgggaaggcggcgggcagttccacgggcttggggagttccgaacgggcatagtctccgacaactgggagttctacaaacccatcctggctgccgaggtgatggaaaacttgaccaaaatgtcaaatggtacggccccgggaccagacaggatcagcaaaaagggtttgctggactgggatccccggggtgaacaactcggacggctattcacggcgtggttgatccgtggagtcataccccgggccttcaaggaatgcaggacaacgttgctaccgaagtccaccgatcccggtgagttgcagagcgtcaacgggtggcgcccggtgaccatcgggtcgatggttcttcggctgttttcgaggattctgtccatgaggatggcgcgtgcgtgtcctctgaatcctcggcagaagggtttcctggcctcctcgagcggatgcgcggagaacctgttgatgctggatgagatcatcaggcgctcgcgggaggacgggagccccctagctgttgtttttgtggactttgcaaaggcctttgactccatagcccatgagcacatcctgtgtgccttgggtgagcgccgggtcgacactcacgttattgagttgatccgcaactcatatgtggattgcgtaacgagggtgaactgtgtggtcggctccacacagccaattcacattaaccggggtgttaagcagggtgaccccctatcacctttgcttttcaacctcgctatggaccccctaatccatagactcgaacaagccagatttgggctacaatggggagatcagggtcggatctccacgctggtctttgctgatgatttggtactggtggcagggtcggtggaggcaatgaatgggagcctcgggatcttggaggaattttgccaacggacggggttgagcgttcagcccaagaagtgccacgggttctacatggacaagggcgtggttaacgactgtgaagcctggaggatcggtggagcccctatccacatgattcctccaggggaatcagttcgttatttgggtgtccaggtgggcccggggcaaggcattgtgactccagatcttatcccgacggtgcgctcttgggtaatgcggatctcggaggctcccctgaagccctcacagcggctgaggctaacgaacgcatttgttctccctcgactcatgtaccaggccgatctcggtaaggttccatcgaccaaactagcccaaattgacggattagtccggaaggccgtgaagcagtggttgcatttgcccccgtcggcgggcaacgggctactgtattcaagggttcgcgatggagggttgggcatcctccggctagaaagactaataccgtcgatacaggtgcggcgcctgtatcggatgtccaggtcacccgacctttggacgcgtaccctaacgaagcgggccgtgacgcaattggactgggagaaactgtggatcaaagccggtggtgatgcgggtagcgtgcctgtaatgggcactggggaagctaacccgcccgatgcagggagtccgccagtctaccccgactggcggcgcggcgagaacttggcttgggcagccctggaggtccaaggtgtgggtgtggaccagttcagaggggacacgatcagcaattcgtggattgcggacccttctgctgtggggttccgtcaacgccattggattgcaggtctggccgtgaggactggagtataccccactaaggagttcctggcgcggggtagggacaagtcaggagcagcttgcaggcgctgctcagcaaggctcgagtcgtgttcacatatcttgggacagtgtgcctgggtgcaggggagtcggattcggaggcacaacaaggtatgtgagctcctggcgaccgaggcggagaggtacggttggactgtaaccagggagttccgcgtggatggacctgagggcggcctcaggatccccgacctggtttgcaagaaggccgatacgatattcgtcatcgatgtaaccattcgttatgagctggatggcgacactctggctcgagctgcatcggagaaggtctcacggtatctaccagttgcagcagaaattgcaagaaggatcggagggcgttgtgcggaggtccgggggttccccgtgggggcacggggaaagtggccttcaagcaacaacacggtactgatggagttagggattccggttggtaggaggagggcgttcgcccgactggtgagccggaggactctgctatactctctggatgtgttgcgggattttctgcgtgagccggaagggtga

SEQ ID NO: 31054 - DNA, 3468 bp, Schizopygopsis malacanthus
  source 1..3468: mol_type = genomic DNA
atgtgggccaccctgggaagggccaaccttccgacccagggtacaaagctggttactgataacaaaaataagaaaaaacctggaccctctggaatccaggtacacagcaacagcgaaatcgaggcaagagctgacaatccgacactggaccaaggaactatcacatgtgaggactgtggaagagccttcccgtcacttaggagcctagggatgcaccgtcaccaccagcaccaggaggaagtgaatgaggaaagagtcaaacttctacagaaaaagaggagactgtggagtaaagcggaggatgaaaagctactggatttggctaatgaagaatggacagaggggatgctgaagaaagatcatctggcactcctccaggccttcttctcccaccgaaccaccgacggccttaagaaacggctgcaacatctgggctggaggccctctcaagtccccctacaggagcaagtactcccaacggctgtttctacgcagctacccgccccaagtcgaccaacaaggacgatctcctttgccactgcaactcccatgctaccatctctgcggagggcaatgaagtggacgtcggaagaggatgcaaagctgcaagctcaggccaacgagatctggaggccggatttgctgaaaggggatctggccaaatccctcgatgccatcacgaaaggaagaaccgctggagcgataaggaagagactccagctgttgaaatggatcagtccggagctggctcttccgagaagcccgcagaataacaccgaagcgggtgaggtggagaccgaagatgcagctaacgacggcggaacaagtcccactactggagcgttggaaaacagggacagtggtgaattaacaacagggctgagtcccgaagaggggtggagagccaaactattggaaacggcattagcgacactggaggacccaagggtgggaacccagaagctaaagggaattgctgagggattgctcggtggctgggtgtcgatagaacaggcggcgcagagtctggagagtgctatccaagaatgcattcccttaaagtggaacccagttaagaggagaagggtctttggtaaaaagccgagatccaatagggagatccgacgcgcaaggtatgcgcatacgcaacgcctctataagctgaagaggaaagatgcagcccactcgatcctagaaggtcgttggagagaggcatacaggggaatggactgtgcggtcgagggagtggaggactactgggcgaaggtctttgagacaagtacgacagagactgaaccctctgaggcatcaccacagtcaagcggacagatcaaatgggaactggtctcacctataacaacagaggaaatccgcttggctctcaatacgatgaggaaaacatctgtggggatggacaaactttcgtcgcaggaattactgacctggcatttaccatctctagccggtctcatgaatacgattctggcagtagaaagattgccctctcacttggcaacggccagagtcacattcctgccgaaggtggatagcccagtggagccaggagattacagaccaattgcaatctcatcggtgcttgcacgtaccctccacaaaatcctcgcgagaagaatgcgagaccattttaagttctcccccctccagtatgcctttctgcaaagggacggttgcctggaggcttcagcactgctgcatgcagtgctacggcggtcacatgaggaagtgaaacccatggcagccgcctttctggatatctcaaaagcgtttgactcggtgtcccacaatgccattcttgcagcaggaaggaaagcgggtaccccaccacccctgttaagttacctaagccatctttatcaaaacgccacgctacatcttgggacttcatatacaaactgcaagaagggcatcagacaaggcgacccaatctcgcctatcctctttatcctggctatgggagaagtgctcgaagaggcacttccagaagtagggatcggctggggcgctgaacaactaggctctattgcatatgctgacgacctcatattgctggccgacaccctgggcgatctgcagatgaagttggatggcctgtgcaagggtctgagtaaggcagggatggctctcaacatcaaaaaatcagccaccctgaccattctaaaagatggtagaaggaagcacctgctgctggcaccgagcacgtatgagtctaaagatggcacaattccagcaatgggcgttgccgatacacagcgatatctgggggtgtacttcacctggaaaggaagaacgacccccaaacagaccaaagaggtggagaggatgctaatggagatcacgtcggccccactaaagccgtatcagagactggaggtggtacgggacttcctggttccgaaactccagcatgaactggtactgggatgtgcccaccggaacacaattggtcgcatcgacaagatgattcgaggatcgatcagggcctggctaaggctgcctaaagatacatcactaggcttcctccatgctccagtgaagtcgggaggactgggaatgcctagtttgggaactacgctaccgcttctgcaaaaaaggagatttgagaagctactatcatgtcaaacctccacggaaagaacgttggtaaagcgcccctccttccaatctacactgcgtcgagtgaatctgccatgcagagtagggaaggaaacggtcttttccccccaggatgggaatgaggaatggacgagggtactggtctcttcagcggacggaaggtcattggtaacggatgatatcgatcctgcaagctaccactggatcagaaaaccacactcagtctttcccagactgcacctcagaggaatccagctacgtggaggaacactctttaccaaagcaagagcctccagggggagagagaggtcgtccgaagaggtggcgtgtagaggggggtgccaggctcgagagacattggaacatatattgcagagctgtgaagtcacccataatgccagatgcgcacggcacaatcgaatcgttaaactggtggagaagggccttaggaggaaggtggaaaggacctggattgagccaattatccctacaataaggagctttataaaacctgacatcctagtggaaacagaacatcatattacagtcctggatgtttcggtggtagcaaaccctagaatggaaatgagccagcagctgaaagtgggaaaatatggaagccaggagaacacagaagccataagggcatggatagactcggataaaccgattaagcatcaacccgtcatattgtccagtagaggcctgatgtacgggccgacgggaaggggactgcggtcgtggggtctaaccaccagagacctatccgatctatgtctattggcagtagcgggatcgcttaaatgctatgatacgtatacccgtggaacgtaa

SEQ ID NO: 31055 - DNA, 3342 bp, Schizopygopsis pylzovi
  source 1..3342: mol_type = genomic DNA
atgcgggccaccctgggaagggccaaccttccgacccagggtacaaagctggttactgataacaaaaataagaaaaaacctggaccctctggaatccaggtacacagcaacagcgaaatcgaggcaagagctgacaatccgacactggaccaaggaactatcacatgtgaggactgtggaagagccttcccgtcacttaggagcctagggatgcaccgtcaccaccagcaccaggaggaagtgaatgaggaaagagtcaaacttctacagaaaaagaggagactgtggagtaaagcggaggacgaaaagctactggatttggctaatgaagaatggacggaggggatgctgaagaaagatcatctggcactcctccaggccttcttctcccaccgaaccaccgacggccttaagaaacggctgcaacatctgggctggaggccctctcaagtccccctacaggagcaagtactcccaacggctgtttctccgcagctacccgccccaagtcgaccaacaaggacgatctcctttgccactgcaactcccatgctaccatctctgcggagggcaatgaagtggacgtcggaagaggatgcaaagctgcaagctcaggccaacgagatctggaggccggatttgctgaaaggggatctggccaaatccctcgctgccatcacgaaaggaagaaccgctggagcgataaggaagagactccagctgttgaaatggatcagtccggagctggctcttccgagaagcccgcagaataacaccgaagcgggtgaggtggagaccgaagatgcagctaacgacgacggaacaagtcccactactggagcgttggaaaacagggacagtggtgaattaacaacagggctgagtcccgaagaggggtggagagccaaactattggaaacggcattagcgacactggaggacccaagggtgggaacccagaagctaaagggaattgctgagggattgctcggtggctgggtgtcgatagaacaggcggcgcagagtctggagagtgctatccaagaatgcattcccttaaagtggaacccagttaagaggagaagggtctttggtaaaaagccgagatccaatagggagatccgacgcgcaaggtatgcgcatacgcaacgcctctataagctgaagaggaaagatgcagcccactcgatcctagaaggtcgttggagagaggcatacaggggaatggactgtgcggtcgagggagtggaggactactgggcgaaggtctttgagacaagtacgacagagactgaaccctctgaggcatcaccacagtcaagcggacagatcaaatgggaactggtctcacctataacaacagaggaaatccgcttggctctcaatacgatgaggaaaacatctgtggggatggacaaactttcgtcgcaggaattactgacctggcatttaccatctctagccggtctcatgaatacgattctggcagtagaaagattgccctctcacttggcaacggccagagtcacattcctgccgaaggtggatagcccagtggagccaggagattacagaccaattgcaatctcgtcggtgcttgcacgtaccctccacaaaatcctcgcgagaagaatgcgagaccattttaagttctcccccctccagtatgcctttctgcaaagggacggttgcctggaggcttcagcactgctgcatgcagtgctacggcggtcacatgaggaagtgaaacccatggcagccgcctttctggatatctcaaaagcgtttgactcggtgtcccacaatgccattcttgcagcaggaaggaaagcgggtaccccaccacccctgttaagttacctaagccatctttatgaaaatgccacgctacatcttgggacttcatatacaaactgcaagaagggcgtcagacaaggcgacctaatctcgcctatcctctttatcctggctatgggagaagtgctcgaagaggcacttccagaagtagggatcggctggggcgctgaacaactaggctctattgcatatgctgacgacctcatattgctggccgacaccccgggcgatctgcagatgaagttggatggcctgtgcaagggtctgagtaaggcagggatggctctcaacatcaaaaaatcagccaccctgaccattctaaaagatggtagaaggaagcacctgctgctggcaccgagcacgtatgagtctaaagatggcacaattccagcaatgggcgttgccgatacacagcgatatctgggggtgtacttcacctggaaaggaagaacgacccccaaacagaccaaagaggtggagaggatgctaatggagatcacgtcggccccactaaagccgtatcagagactggaggtggtacgggacttcctggttccgaaactccagcatgaactggtactgggatgtgcccaccggaacacaattggtcgcatcgacaagatgattcgaggatcgatcagggcctggctaaggctgcctaaagatacatcactaggcttcctccatgctccagtgaagtcgggaggactgggaatgcctagtttgggaactacgctaccgcttctgcaaaaaaggagatttgagaagctactatcatgtcaaacctccacggaaagaacgttggtaaagcgcccctccttccaatctacactgcgtcgagtgaatctgccatgcagagtagggaaggaaacggtcttttccccccaggatgggaatgaggaatggacgagggtactggtctcttcagcggacggaaggtcattggtaacggatgatatcgatcctgcaagctaccactggatcagaaaaccacactcagtctttcccagactgcacctcagagggatccagctacgtggaggaacactctttaccaaagcaagagcctccagggggagagagaggtcgtccgaagaggtggcgtgtagaggggggtgccaggctcgagagacattggaacatatattgcagagctgtgaagtcacccataatgccagatgcgcacggcacaatcgaatcgttaaactggtggagaagggccttaggaggaaggtggaaaggacctggattgagccaattatccctacaataaggagctttataaaacctgacatcctagtggaaacagaacatcatattacagtcctggatgtttcggtggtagcaaaccctagaatggaaatgagccagcagctgaaagtgggaaaatatggaagccaggagaacacagaagccataagggcatggatagactcggataaacgattaagcatcaacccgtcatattgtccagtagaggcctga

SEQ ID NO: 31056 - DNA, 3729 bp, Schizopygopsis pylzovi
  source 1..3729: mol_type = genomic DNA
atgtatcaaggatatactgcttacttattgggcgggagtaactatgactgttacatggcccgggcgcctcctcgtggcgaccgctggatagggtgggaagctttggttattccaactaccggcggagggtgtcaagtcggcacccccgcctacaacccacccgaactaagatccgggccatcccagtcgggccaaccacccgcctgggattttctgctggttacaagaaaaaagaaattaagtaaaaatcctggtccctctggaaaccaggattacagcagcggtgaggctgttaaggaggctggaacttttgaatctgtctcaggtcccatatcgagtgataatacctgtgaagattgtggcttgactttcccatcgtcaagaagcctgggcatgcatagacaccatcggcacccagtggaagttaaccaagagaggattacggtgcttcaaggaaggaggaaaggatggtcaaacggagaggataatgaattaagagctaaggcagactcgatctggagagtcggcatgaagaagaaggatcttttaactcacctgcatgttacctttcctcaccgcaccctggaggcactgaagaaaagacttcaactcctgaagtggacatgcaccgtaacatcgagggagcatcaacaacatagtccaccgagagacaatgtccccgaccaaggagatcaaatgtcaataggaccaacaaggatgaccgaagtggacgatctaccaagcagaaataacatccagcaagatatccccctgctagccagtgccgccatcaagctgggaaaatcaacgaaaaactggtcggaagaggaggatatactgcttactgaagaagcaacgaaaatctgggtgatgggaacgactaaaagagagttggcaaacaagctacactctcgcttccgctctcggacagtagaggctatacggaagaggttgcagactttggaatggacagtaccaacagttgtccaccaaagggaaccatcttctgtgtatagaccccataggccagaaggatctcccacatcactgtcgccaccaccacagttagccacgtcaccccagaccgtgatgttggtccagtctacaccccttcaggaggatacaggaacatcacgtgtagtacagcctgtgaatgtggagcagtggaggaaggatatgctggagaaggcgtaccattccctgaaatcggatcggttccaacctgagaggttgcggaaatggattctggacatactggaggggcgattaaccaagctggaaggagtgaagctgttgaaagagcatacagcaaagatattcccgactagatggttaccagctccacctctaagaacttcgggaaaagtgcttaggtccaacaagcaactaaggagggccagatatgccagcattcagaggctgtacaagttgcgaagaaaggacgccgccaaaaccatactggagggcaggtggaaggatgcatataaggacaagcacagggtggacggattggaggaatactggactaaggtgtacgcaggaactggtcattctgatgaaccggttctaacaacggagaagggagaacagagatgggaaatattatctccaataacagccacggagatcgaggatgccctgaaaggcatgggaaattcggcagtggggatggatagagtctcgtctagagaccttctgcgatggcaccagccatctctcgccggtttctgcaatgttattctggccctggaaacgatgccctcgtccctggccaacgccagagtaactttcatcccaaaggtggaattgcccgaaacaccgggggactgcagacctattgcggtatcctccactctgacacgagcacttcacaagatactggcaaggagaatgcgggacacattcacattctcacccctgcagtacgcttttcttcaaagagatggatgcctggaagcaagtatgctgctacaggctctgttaagaggaacgcacgatgggggaactccgatcgcaatgttgttcctggacatagcaaaggcatttgatacagtctctcacgatacgatcttggaggcagccaggtcggcgggagcaccggaacccttggttaactacctggcgaatctctatgaagaggcagaggtgaacctggggacaaggatgacaaaatgtggaaggggcgtaaggcaaggcgatccattgtcaccaatccttttcattctggtaatgaacaaagaagtaaaagcagcttgccctgagaaaggggtggaattaggtggtcaaatcatcaatgcaattgcctacgcagatgacctggtactaattgctcagaacagtgaggacctccaactgaaattggatggactctgtagagcattgaggggaatggggatgacactgaatgaaaggaaatctaaggccatcacaatccttaaagatagaaggaggaagtgcctactcctcgaccctcattcttattccaccgatgaaggggtgattccagcaatgggtgttctggataagcagcactatttgggattggattttacatggaaaggaaaagtaacaccaaagcacactgggcacctggaaaagatgttacatgaaatcaccacggcaccactgaaaccatatcagagactggaaatcctgaaaatattcttggtccccagactggtgcatgaactagtgctagggggagcccacagaaatacacttctgaagatagacaaaatggtgcgaacagccgtgaggaagtggctgcgactgccgaaagatacgccgttagcctacctctattcacctttccaggcgggaggcctagacattccctcgataagcaacacaataccgatctggcaacggtcaaggtcgatgaagctgctatcaagtccaaatccgatcgagagggcattgacggaaatgccatctttccagaaagccctaaaacgaatgaacaggccgtgtagagtgggtggcgaagcaatcaccacggtgaaggaagcccgtgagatgtgggctaaacaacttgcccagtcagtggatggaaaggatataactatgactgatgtggacgcagcgagtcatctatggctggaaaaaccggaaagagtattccctcgattgcatctacgggggatacaactcagaggcggggtactgtcaacaaaagcaagacgggcaagaggtagagagtccagcacggatgacataatgtgtagaggggcctgccaagtaagagagacacttaatcacatacaacaaagatgcgatgtaacccacgatgcaagatgtgctagacacaacagagttgtgaggagattggagtccatgctgaggggaagagcctccaacgtttgggtagaacccattataccgacagcaaaaaccttcataaagccggacctgctcattcacaagtctgagaaagtgatggtaatggacgtgtctattgtggtagggtcccggatggaagagacgtggaggctgaaaacccagaaatacagtacaccagagaatgagagggcaattacatcatggcttcaacacactcacaactcactagagcacatgccggtgatcatctcctacaggggcttaatgtacggaccaagtgggagagcactgaggaatcaaggcctatcgaaaagggacatatcggacctgtgtctcctgacagtggctggctccctcaaaagctatgatctttacacgcgtgggacctga

SEQ ID NO: 31057 - DNA, 3627 bp, Gila orcuttii
  source 1..3627: mol_type = genomic DNA
atgataatgtcgaataatagcaaccccatactggctggcacgtcgcccaggataataaggtgcctagcagtcgcctctggattgggtggctgtggtctggttagatccccttgcggtcccggagccagggatcgtggaggcggtagtggctcacctggtgatcgaaattatgctgcggaattcggattaagagaatgctcggtggtgttgactcgccttggggcagggcagtcagccacagtgatgcggacaacccccggacgggaccaactcgagggcccgagctctgtcaaagaaacaccggacatggggcaacccgtcgccgacccagggggggatccccgccaggtcccccccgcggatgagaggcaggaagaggttccaggggtggtgattatattgccactccaggatttcacctgtactctatgtggcgtatcggctagcacttggacgtgggtgcagagacactttgcaacacgtcacggaaaggtgcctgttagatacagctgtaactcgtgcggaaaaacctctcacttggggcaggccattgcatgtcacatccccaaatgtaaaggaccaaggatggctgaaccagaaggactgataagatgtgagggatgtgcggcaacgtttgccacgaggagggcgcggagtattcacgagttacacgtccaccccaacattcgcaataggaaacgtattgaggagggaaagagacgggacggttctgccggacggcagacgggagtggagacaggaggtcgggctgtcttgccagtctcgagaggggcttccccggatggggaagttccctcaacaagtggaatatctgcgagagagcgtggagtaccgttggagcccattgcgagttcgtcggtccccccaagacaacccaacttaccagagggaggactcctgcgtttattccaggaggaagcccgtaaaatggtgagcgaggtggggggcgatggcacggattacatccacgtccttgctgcttggttggatgacaacgaccagttacctgcactggtcgaggcggcaacgcataggatactccagggttgcgaccctaggaggagaggtagacccgccattaggaatcggagggcgatagttgcgccaaggcagagcaggttgcgccgacataaaactctcgccaagagtcgcgcttatcatacctgccaatacctttacaagaaggaccgagcccgccttgctaaaaagatattggacggaaagaaaggacaaaggtgtacaatatcacaagaaacgatttacagcacgtttcaggccaaatgggaatttccagctccctttggcgggctcggtcgattcggcgcttgggtgagtgctgacaacactcacctggtggggcctatctctcaaggcgagatccgaacctgtctccaacttatatcgaacgcatccgcaccaggcccagatgggattgggaagcaggaaattctcaattgggaccctaagtgcgaaaccctcacacggctgttcaacatgtggtggttcacaggtgtcatcccaaaaagcctgaagaaaagtcgaacggtactgattcctaagacatctgacccaggagcggtgatggaggttggaagctggaggccaatcaccatcgggtctatgatcttgagactcttcactagggtgattaacaaacgaatgcaggaaacgtgtccgattcaccctagacaaagggggtttcgcccaagccccgggtgcgcggagaatatagaggttctgcaagacctcatccgccactgcaaagaagatcgcagccaacttgcagtggtattcgttgactttgcacaggcttttgacaccgtctcccatgagcatatcctatcagctcttcggcagatgaacgtggatccacacatgataggtctgatccagcagatctatacggacagtacgacttatgtcgagatcggaagtggggccactcctgatattaatgtgagggttggtgttaagcaaggagatcccatgtctccattgcttttcaacctggccatggatcctttaatccatggactcgaacgctttggcaaaggatacacggtcgaaggtcactcagttacgactctcgcttttgctgatgacctggtgctggttgggggatcgtggagtgatatggcccacaacttgctcctgctggacgagttttgtcagaacaccggcctacgagttaacccgaggaagtgtcacagcttcctggtcaggccctgcagcggtgcttttacggtcaatgactgcgccccatgggttctggggggcaaggccctgcagctcacaagtatcgaagacacggttaaatacctgggtgtcaaattcaacccttgggggggggttgatgtgcctgacctggaggtgattcttgacaagtggtgccagaaaattgggcgatcgctccttaaaccctcccagagggtagttctactcaaccagtacgctgtcccaagactattttaccaagctgacctttgtgaggtcaatgaccgtgtactccagagcctagacgggacgatcaggaggtcggtgaagaagtggctgcaccttccgccgtccacctgtgacgggctgttatacgcaaggaaccgggatggcggcctgggaatctgcaagctctctcgacaaatcccgtccactcaagtgaggagattctttagtcttgctcactcctcggaccccctgatacggaaattgacggataactctcgtgtaagagctaagtttgtggggatgtggcggagagccggtggagatgcggacaaccttccgtccctggatggggcggactcgaacgatagaggagacaccaccggctcgttgactagccaccaccgggtgtgcccagtaccgagtgactggaggcatgacgaattcctgagatgggcaggcctaccgactcaaggggttgggatacttggcttccaccgctcaactgcgagcaacgcatggttgggtaatccggttggctttactcagaggcagtacattgcagctctccagctgcgcgcatgcgtgtatcccacccaggaattcaaacacaggggcaggcgtaaggagggtgcggcttgcaggcgctgctcatacaggttggagtcaagctcgcacattctcggacaatgcccggctatgcaggaagccaggattgcccggcacatgaaattgtgccgtctcctcggggccgaggctgagggtcacgggtgggaggtccgccaggaatgggagttcaggaccctccatggggatctgagacgacttgacttggtgctcacccgggattccaaagccttagccattgacctaacggtgcgttacgagtttgctcctgattctctgtccaacgctgcacaggagaaactcgattattacggtccccacagagaggtgattgcacgagagttgggtgttggcgaagtggaagtgattgggttccctttgggagctcgtggcctgtggccagtcgggaattacaggacattgacggctattggactcagcagggcgagagttaggtccttcagcaggctgatgagtcggagaactcttctctactcgttggacgtgctaaggacctttcaattgtcgctgagatcctga

SEQ ID NO: 31058 - DNA, 3216 bp, Ahaetulla prasina
  source 1..3216: mol_type = genomic DNA
atgcaggcttggacgcctccgcgtggcgaccgccggggagggtacttggtacccaagccaagatccaagccacccctctgcatgccataccgccctagcagagggattgccactggttacttaaccatagtatatagtcctagtccctctggacacatggactccagtgacaaagatgggaatgccattggtgcaggcacccagaacagagcggacaatcccagatacccgtgcttctgtggctccacttttagatccaaacggggcctcggcctacatagagcgcataaacatccggcagtactaaatgccgagcgcttggccgtactaccaacgaagcgtctgacatggacccaggaggacgatgaagcgctcaagcggttatcggacaagcactgggaaagaggtatgctgaagaaggacttaatcacccttctcacgtcctacttcccagatcgttcgttcgaggccgtcaaaaagcgtcttcaattgaccaagtgggctccacccgaagaaaacccagagagacttgaacgccctcatagagcggaaaccccagagagagtggatgcacatctcgcagatccgaccgaaactttgcagagccatggtccggatcccaccaccgctacctcatggagacgtgccctcctggtagccgcggcagaccgctttaaggaaaccaagctgggggcggaggagttgaaccagatggtccgagacatacagactggagagctcagccgaaagcaatgcagggcccggctaagacaacatgccaaacaatggttcccacacaaatggaaaccatcaaaacctaagcccgccaacgcgtcatgtcttaaaaacaagaaagccatccgcagagccaactacgcgatggtgcagaagctatacaggcttcggcgacgcgatgctgcctccactgtactgtccggccgctggagaaatgcgtatagagggccagcgccattgccgcccgagatggaagaatactgggcctcagtattccaaacaccgagtgcaaacgatgataggagccctgcagagccagctgcagtcctgtggtccctagtggcagccattaccccatcagaggtcacgtcagccctcaacggtatgaaagatagtgcgccaggactcgataaaataccggcggaggaactgctgacctgggaccagccctcgctagcagcatactacaacttgttgctagcagctggtggcccaccgaaacacctctcatgctcccgagtggtgttccttcccaagacggacgaaccatcggctcctggggactataggcctatctcaatcgcttcaaccatcctccgggctttccataagatcctagcatggcgcctacgagatacgcttcagctctctccactccagcatgcgttcctccagcgagacggctgtttggaagcatcgaccctgctacattccatctttcgtagaatccatacgagtcgagtgccctgtgcgatgctgttcctcgacgtcgccaaagcgtttgatacagtttcgcataagagtctcttccgtgtggcctacgaagcgggtctgcctcctccgctggtgtcatacctccaacacctgtacaagagatcatccgttaaacttgcagaaaccaccaagtgtggtcggggcgttcggcaaggcgaccctctatccccgctccttttcatcttggtcatcgacgacatcgtcaaacgctcactcccagacgtggggtttgactttgatggccaaagagtcggcagtctagcctatgcagacgacctagtgctctttgcagaaaaatccaccaggcttcaggagaaactcaacctgctatccgaagccctccagcaagccggtatggcactaaacgctaagaaatcccacggcctcaccatcgccagggacggaaagcgtaagtgcatggccctagtccccactacatacgagtgcaaaggggacaccatacaacccctagggacagatgaccaagtgagatacctgggcctccagtttaactggaaaggaaggatcgtaccgaaacataccggcaagctggactctctgctgaacgagctgaccaaggcaccgcttaagccgcaccagcggattaagctcctaaccacctttctggtgcccaagttcacccacgaactggtcctaggtcacgcccaccgtaataccctgaaacggctagactgcttgacgagagctgcggtgagacgctggctcaggcttcctaccgataccccaacgggctacttccacgctaacgtcttagacggaggtctggggctgccatgtttctccacctcaatcccacttctgcaacagaagcggctcgagaagatagccctgaaccctgcaactctctttcagatagtgcagaggcaggactccttccggtcgctagcgcagcgaatggaccggccatgcagactgggcggcgcggtcgcaaccaccaaagcagaagtgagagaagggtggcagatcatgctctccgcctccgtcgacggcaaagagctgagtatcccacaggtagacaaagccagccacgagtggctacgccgaccagcccgggtgttcccccgactctacatcaggggcatccagttgagaggcgggttactccccaccaaagccaggagcgcccggggaaacaacagacaagtcacagaccggacttgtcggggagcctgccgtgccccagaaacccagaaccatatcctgcaggtttgcgagttgactcacgatgcgagatgtgcacgccacaaccgagtgcttcggaccctggagaagcagctacgccgaacggaggcccgtaccagaatggagccagtgattccatccggatcttccttcataaagccggacctgatcgtagaggcggccaaccagatgtgggtcctcgacgtgtccatcgtggccggataccgaatggaagaaacctggggcataaaagccagaaagtacgggcgtgaagaccgcgtggcagacatccgccgatgggccgacgtacccgagcacacaccagtgttccagatgccggtggtgatttcgaaccgagggctgctctacgggccgtcaggcgaaggacttcgagccatgggcctgagccgcagggacttgacggacctttgtttattggcgatcagcggctcactcatgtgcttcgatttatacaagcgcgggactaaggactggaaagattga

SEQ ID NO: 31059 - DNA, 3981 bp, Aldabrachelys gigantea
  source 1..3981: mol_type = genomic DNA
atggcttggatagccaggcggattgcggaggacggacccacatcctttgggtgtgtggtggggttgggcaacccctttatttttgcccccctggtaagggcagcctcccccaggtacgggttagactcccccaggtacgggttagttccccctggtaagggtagcctcccccaggtacgggttagattccccctggtaagggttagtttccccctggtaagggtgagtttccccctgagaagggcatatcttttagctatggaaaaaaggaattttgattcgtataccggattggcgctggaccgggttaaaaacgcccccgctgccggctttgatgccccggttggcagtgttaagtatattaggggagtaatacgtgtcgctggacctatggataaaacaggagggacgctaatgatgtctcagatgtatgagactgagtatttgatccctccagttgttccaagagtggtggaggaggaagttgaggatcgcagtagtaaagaccaaggtgaggagattttatcgattttaccaatggtttttactgggagtgcttttaataatttatttatggatgagggtgagccaaattttaagtatttaaatgaatttgaggatccatactttagagatccagcctttttaaattgtgagttacaaaaagatttgaattatgctgggtctaatagtgatttagttgttaaaaggaatgatggggtattttatttggaataccccgtggacaaatttaattgtcctatttgtcctcaaattctggcatcttttggaaaatgggccaagcatattaatgtggtgcaccaaagtaaggccattagagtggtgtgtagtaagtgtggaaaatcctctcagtttcataatattgcttgccactaccccaagtgcgtgcccagggaggtggataccccgagaaatagtcatgcctgttccatatgtgggcttgtattccatactcgttcgggtcttagccagcactgtaggcatcgacatccaaatgagaggaatgagcaaagaaaagagaaagtaggagttagaaggaaggttcaagggggagtatctcgtaataaggtgtggacagaagaggaaattaaacagctagtagtattggaagaaaagtatgcagggaaaaggaatattaataagtgtatagagctggaattaaaaagtaaaactaataaacaaatagcagataagcggcgggaattggccaagaagcggttagttgtggatacggaattagttggagatttagcggtaggaggtttgttggtagatgttttggaagttcctccaccacgggaaagaattgtacctttaaaggtgcatcaagagttggatcagataggtaggatttgtagacagggtaagcaaaatagagaggggagggagataaggagaagtttagaggagattgaaggtttacttatggaggattcgaccaaagctcttggttgggctaaactggagaaagtttgtttttctttggtagagaaggaaggtaggggtgtggaaggacaggttaggatgagaagtgtgatggatggggtgagggaaaaggggaagaagagacaatccaatgctcttaggagatatgctactaagaaggctagatataaattttatcaattgttgtttgagaaagataggagaagattggcgagaattatattaggtgagccagatagggtaacttgtggaattcctatggaagaaattgaagagcattatagaggactgttgtgtgaggtggggcacgggagtatggtaggatggccatcgtctgcggaggttgcggataatgatttattactgagtccgatctccgcagatgaagtgagagatgttttaagggattttaaaaaggatagtgctccaggcccagataaggttagtattagtgctctccgggatgtttttaatatggactctcttatactcacaaaaatatttaatatgtggtttttagagggacagatccctaaggtttttaaggagaataggactattttaattccaaaaacgaaagatgaggaagaattaaagaaaataacctcttggagacctttgacaattggctctgtgtgggtgaggacctacacgaaaattttagcaagacgattatcggaagcagtgaagatctgtgctaggcagaaagggtttgtagctgcttctgggtgtgaggaaaatatttcgattttaagtaatttaataaaaggagcaaagcggaatggagatgagatagcgatcgtttttgtggatttagctaaggcatttgattcggtagggcatggccatattgtggctggattgaagaggtttggaattcattcgcattttattgagattattagggatctttatgaggattgttttacacgggtttgggtgggtgctagttgtacagagtctattttaataaaaaggggggttaagcaaggtgatcctctctcccccattttatttaatattgccttggatccgcttttaacgaaattagagagagaagggagtggtttttatgtacaaggcaatatggttacgtcattggcttttgctgatgacgtagctattgtaagtagttcgtatctcgggatgcagaggaatttagggattttagaggaattttgtaagagtactaaccttcgggttaatgttaataagactaagggtttccacattttaactaagtataaaatgtatgtggtcaatcctaaggataattggcagttagggaaagaaatgattgagtatgtccaaccagggagttttgagaagtatttaggtgctaagattgatccgtggattggggtaggaggatcgggattgaaagaaaagttggttgagtggagtgatagattgatggaggccccattgaaaccaagtcagaaaatgttgattttacaagtttatgttttaccgaaattattttataacttgcttttagtggagccttcttttaatctattggaggatttagatttgttagttaggaagaaagtgaaggaaattttacatttgcctcagagtacaacagatggtttattttactctagaggtagggatggggggttagcgttgacgaggtttagcatacagattcccaatatgttgcttcgtaagtggaggcgtcatgtggtttccaaagacagttgggttgatctttcatatttgtatgcaggagataatttgattgataaaataatggaacttggtgcagttacccctcatccccggaaatggagagaggaagagtttttgcgatggtctaggatgagatgtcagggtataggagtaaagtattttcagaatgataggattagtaatactatttttagaaggtcggataagattaagcctgcagtatatattgcggctttgcagcttcgggccaatgtttacccaacaagggagacgctgtcgaggggtagaattggacacaatgcgttatgtagatggtgtggaaaggttaaagaaaccgttcctcatattagtggacaatgttataagactaaagagatgagaattaagaggcataatagggtagttttggccttagtggataaggtggggaagttaggatggaaggtattggtggaaccgcacctgaggaatagtaacggagaccttagaaagccggatattatttttgttaaaggagatacttctgtggtggtcgatgtcacggtgagatgggaggacaacgaggggagtttggagcaagcccatgaggataaggtgacatattatctcgaattggagaacgagattaagatcttaacgggaggtaaaaatgttcacttttttgggttcgtggttggggcgcgtggcaaatggagtgagaggaatgaggatttattgaaggttttgggtatggatagagggaaaaattttaaagaaagtatatgcagaatggtcttatattctactgtagatatgatggcaatattcagtgaccggtaa

SEQ ID NO: 31060 - DNA, 3267 bp, Ascidia mentula
  source 1..3267: mol_type = genomic DNA
atggagaaagaaatgcctttacccatgaaaacagtcaatttggtctacaaccaccccaacagcatcagctgcaataagtgctccctcatccttaccaccgaccagggagcacagacccacctgcgaacccaccgtatccccagatctggctacgcgtgcggtaagtgccatcaccctttcgagcgcatttcgcaggtcgcctgtcatttcccgagatgcaagaacaatccagaggaaacaccatctactgcgaccgcgattgcgtgcgaactctgctctcgtcactttgagaccacgagggggctccatctccaccagcgatcaaaacaccccctcgaataccatcaagatctggagaggaaggatgtctcgaagcggcggccctacaccagcgacgaggtcaacatcttagcgatggaggaggcaagacttcatccgcagcccaggaacatcaacaaacacctagccgggctgcacctcgtcgaccgaacagcagagcaaataagggtgatgaggaagtctctgcggtataaatccaccctcgcttcccaccaaacgagagaagagaaggaagaagatgaagaaaaggaagaaggagaaaaagagaatgtagaagaagaagaacgcggtccgagagaagaagagaagaaggcaatgtgggacgaggagttggataagtacctggacgacctaaccagatcaggcaatttgtccccaggtacgcgcgcggtgaaccgtctcctgaagaacagagccaaagaccccaacatcatcgagtctctagacggtttgctgcgcgacctttacccggagattttcacccgcagaagtaagtccctgcggaagaaagtcgagcaggagcaaagagaagaacagccaaagtcatcggcggcgagaaagagggctgagtacaccctacaacaacaactttggaagagaaaccgccctcttctcgccaaagtactgctcgacgacgcgccgatcaatcccagaggacctcctacctcagagatagaagagatttacaacgaaagattcggaacaccatcaccgacagacgaggaagaatataagaggaaggaaaatcctgaggtaggaaacctgctccttcccatcacggagcaggaatgttctctgatgctaagaactttgaaacggtcggcgcctggtcccgataagatcaccaccgcgcatctcaaactgattggccctaagatcctctgcagaatcttcaatgtttggatgcgcttcggggccactccacagtggaccaaagagagccggacaacgttgatcccgaagaagaacacggacctccacgacgtcgggaattggcggcccatcaccatcgggtcgcatctcctaagagtatatacgaagctcctatcccggcgtctccagacgagtgtggtgattaaccatcgtcagaaggcctttcgcccggttgagggatgtgcggagaacatcatcatactgaacaacatcatcagagatgcctcaacaacaaggcgccgcacagacctcgccgtggccatactagaccttgctaaggccttcgacatggttagtcaccattccgttgttcgagctcttcacaggcatggagtaccgcaacccttcataaacatcatcaaggacctctaccaaggatgcaccactaccatctcccttggcggagagtcgacgtcccgcatcaacatcaccaggggcgtcaagcagggttgcccgctatcacctctgcttttcaacatcatcatagacgaattgcttgatgagttgcccaccagtctcggttataacatcaagggagccagggttaacgccctggccttcgccgacgatttggttctggtgggtaactcacctgaaggaacacaacatctcctcaacaaagccaacctattcttccatagcagaggattgcggcttcagccgaagaaatgtttctccctcgggatcacccacacccggggcaagacttcaacccacagggtgcggatcacaccattcctcaccatcgaagagcaccctgtgagaaccatcagacccggggagtgggtgagatacttgggcatcaacatcggccctcaggggacctgcaagatgcagaaagagaagataacatcagatctccagcggctcctgagggcccgtctcaagccgcagcagaagatctacatgctgcggcaccacatcatcccgagatggagttacagtctcgccgtcacctcccaaacgatcaacaccatcaacttcattgacagggaggtaaggagatgtataaggtctatccttcacagcccaccatcgctctcaaatgactttatacatcttccgacaaagcacggcggactgggcatttcttccatagctgaagggtgcttcattgccaaacaacgtctgcggggcaggcttgttgaatccttggatcctgcagtagctgtcttagccccgactctgcacaacaagaccctgcaacatcttcgcaggagactgcaggcagaggtcgggagcggagaagaaatatcaacagccaccattctccgcgccagacagctacgacttgccagcaaggttcaaggctacggttcgttccacctcaccggtaagtactgcaacaactggcttaccggggtaagtaacatcttaacgggccgtaacttcgtgcaagcctgtgcactacgcacgcaaacgctgccaacccgtgaatcaataagtagagggcgcaataaccctgaatcgcccccactatgtagaaactgcgggttgcagtgtgagactctgtcccacatcctgcaaaactgccaccgtactaacaaagcccgcctctcgaggcataatgcagttttgcaggtgctcgtgaaacatcttcgagcgaggaagtggaagattgaagaagagcccatcgttccaacttcctccggcagagtcatcaagccagatctctatgcagtctcgccgcaaggtgagcactacatatgggacgcggccatcccctacgaagggaagcaagagtcgttggagatcgcgaggattgccaaagtgcgaaagtacgaggcgtaccgccaaaacatcgccaaccacttcaacatcccggcatcccgcatctccttcgacggaatcatcgtaggggcgagaggagcaacaccatccagcctcctctcattgggtaagcaggtaggcttgaccgacaaacaactccagctgatgtcaatgagggccatggaaggaagcctcaaaatcttccgattattcatggctctctag

SEQ ID NO: 31061-33000 - skipped (1940 entries)

SEQ ID NO: 33001 - DNA, 153 bp, Acridotheres tristis; identical to SEQ ID NO: 20635
  source 1..153: mol_type = genomic DNA

SEQ ID NO: 33002 - DNA, 290 bp, Acrocephalus scirpaceus; identical to SEQ ID NO: 1876
  source 1..290: mol_type = genomic DNA

SEQ ID NO: 33003 - DNA, 324 bp, Agelaius tricolor; identical to SEQ ID NO: 1877
  source 1..324: mol_type = genomic DNA

SEQ ID NO: 33004 - DNA, 362 bp, Ammodramus caudacutus; identical to SEQ ID NO: 20608
  source 1..362: mol_type = genomic DNA

SEQ ID NO: 33005 - DNA, 361 bp, Ammospiza nelsoni; identical to SEQ ID NO: 20610
  source 1..361: mol_type = genomic DNA

SEQ ID NO: 33006 - DNA, 184 bp, Buteo platypterus; identical to SEQ ID NO: 20654
  source 1..184: mol_type = genomic DNA

SEQ ID NO: 33007 - DNA, 362 bp, Chamaetylas choloensis; identical to SEQ ID NO: 1354
  source 1..362: mol_type = genomic DNA

SEQ ID NO: 33008 - DNA, 192 bp, Chamaetylas fuelleborni; identical to SEQ ID NO: 1880
  source 1..192: mol_type = genomic DNA

SEQ ID NO: 33009 - DNA, 328 bp, Cichladusa arquata; identical to SEQ ID NO: 1879
  source 1..328: mol_type = genomic DNA

SEQ ID NO: 33010 - DNA, 301 bp, Ciconia episcopus; identical to SEQ ID NO: 20627
  source 1..301: mol_type = genomic DNA

SEQ ID NO: 33011 - DNA, 266 bp, Colaptes auratus; identical to SEQ ID NO: 20656
  source 1..266: mol_type = genomic DNA

SEQ ID NO: 33012 - DNA, 282 bp, Cossypha archeri; identical to SEQ ID NO: 20643
  source 1..282: mol_type = genomic DNA

SEQ ID NO: 33013 - DNA, 193 bp, Cossypha dichroa; identical to SEQ ID NO: 1878
  source 1..193: mol_type = genomic DNA

SEQ ID NO: 33014 - DNA, 435 bp, Falco fasciinucha; identical to SEQ ID NO: 20632
  source 1..435: mol_type = genomic DNA

SEQ ID NO: 33015 - DNA, 240 bp, Gallinago paraguaiae; identical to SEQ ID NO: 1346
  source 1..240: mol_type = genomic DNA

SEQ ID NO: 33016 - DNA, 260 bp, Garrulus glandarius; identical to SEQ ID NO: 20630
  source 1..260: mol_type = genomic DNA

SEQ ID NO: 33017 - DNA, 369 bp, Geranoaetus albicaudatus; identical to SEQ ID NO: 1340
  source 1..369: mol_type = genomic DNA

SEQ ID NO: 33018 - DNA, 372 bp, Harpyopsis novaeguineae; identical to SEQ ID NO: 1339
  source 1..372: mol_type = genomic DNA

SEQ ID NO: 33019 - DNA, 232 bp, Limnodromus scolopaceus; identical to SEQ ID NO: 1344
  source 1..232: mol_type = genomic DNA

SEQ ID NO: 33020 - DNA, 392 bp, Melierax canorus; identical to SEQ ID NO: 20647
  source 1..392: mol_type = genomic DNA

SEQ ID NO: 33021 - DNA, 349 bp, Myiozetetes cayanensis; identical to SEQ ID NO: 20641
  source 1..349: mol_type = genomic DNA

SEQ ID NO: 33022 - DNA, 363 bp, Otis tarda; identical to SEQ ID NO: 1864
  source 1..363: mol_type = genomic DNA

SEQ ID NO: 33023 - DNA, 176 bp, Prinia subflava; identical to SEQ ID NO: 20642
  source 1..176: mol_type = genomic DNA

SEQ ID NO: 33024 - DNA, 346 bp, Serinus canaria; identical to SEQ ID NO: 20613
  source 1..346: mol_type = genomic DNA

SEQ ID NO: 33025 - DNA, 175 bp, Aphelocoma californica; identical to SEQ ID NO: 20606
  source 1..175: mol_type = genomic DNA

SEQ ID NO: 33026 - DNA, 356 bp, Oenanthe melanoleuca; identical to SEQ ID NO: 1353
  source 1..356: mol_type = genomic DNA

SEQ ID NO: 33027 - DNA, 275 bp, Phylloscopus trochilus; identical to SEQ ID NO: 1883
  source 1..275: mol_type = genomic DNA

SEQ ID NO: 33028 - DNA, 358 bp, Geothlypis trichas; identical to SEQ ID NO: 20617
  source 1..358: mol_type = genomic DNA

SEQ ID NO: 33029 - DNA, 208 bp, Xenus cinereus; identical to SEQ ID NO: 1347
  source 1..208: mol_type = genomic DNA

SEQ ID NO: 33030 - DNA, 250 bp, Aphelocoma californica; identical to SEQ ID NO: 1352
  source 1..250: mol_type = genomic DNA

SEQ ID NO: 33031 - DNA, 196 bp, Cichladusa arquata; identical to SEQ ID NO: 20637
  source 1..196: mol_type = genomic DNA

SEQ ID NO: 33032 - DNA, 210 bp, Scolopax minor; identical to SEQ ID NO: 1345
  source 1..210: mol_type = genomic DNA

SEQ ID NO: 33033 - DNA, 304 bp, Tyto alba; identical to SEQ ID NO: 20653
  source 1..304: mol_type = genomic DNA

SEQ ID NO: 33034 - DNA, 124 bp, Acrocera orbiculus; identical to SEQ ID NO: 20665
  source 1..124: mol_type = genomic DNA

SEQ ID NO: 33035 - DNA, 144 bp, Drosophila sulfurigaster; identical to SEQ ID NO: 20674
  source 1..144: mol_type = genomic DNA

SEQ ID NO: 33036 - DNA, 253 bp, Rhopalosiphum padi; identical to SEQ ID NO: 20675
  source 1..253: mol_type = genomic DNA

SEQ ID NO: 33037 - DNA, 200 bp, Nemotelus nigrinus; identical to SEQ ID NO: 20676
  source 1..200: mol_type = genomic DNA

SEQ ID NO: 33038 - DNA, 168 bp, Chlorops oryzae; identical to SEQ ID NO: 20678
  source 1..168: mol_type = genomic DNA

SEQ ID NO: 33039 - DNA, 622 bp, Andrena bucephala; identical to SEQ ID NO: 20679
  source 1..622: mol_type = genomic DNA

SEQ ID NO: 33040 - DNA, 110 bp, Ascidia mentula; identical to SEQ ID NO: 20625
  source 1..110: mol_type = genomic DNA

SEQ ID NO: 33041 - DNA, 190 bp, Crotalus oreganus; identical to SEQ ID NO: 20621
  source 1..190: mol_type = genomic DNA

SEQ ID NO: 33042 - DNA, 123 bp, Gopherus flavomarginatus; identical to SEQ ID NO: 20622
  source 1..123: mol_type = genomic DNA

SEQ ID NO: 33043 - DNA, 105 bp, Malaclemys terrapin; identical to SEQ ID NO: 20623
  source 1..105: mol_type = genomic DNA

SEQ ID NO: 33044 - DNA, 467 bp, Eublepharis macularius; identical to SEQ ID NO: 20704
  source 1..467: mol_type = genomic DNA

SEQ ID NO: 33045 - DNA, 125 bp, Emys orbicularis; identical to SEQ ID NO: 20657
  source 1..125: mol_type = genomic DNA

SEQ ID NO: 33046 - DNA, 124 bp, Caretta caretta; identical to SEQ ID NO: 20659
  source 1..124: mol_type = genomic DNA

SEQ ID NO: 33047 - DNA, 540 bp, Pleurodeles waltl; identical to SEQ ID NO: 20660
  source 1..540: mol_type = genomic DNA

SEQ ID NO: 33048 - DNA, 136 bp, Aspidoscelis tigris; identical to SEQ ID NO: 20681
  source 1..136: mol_type = genomic DNA

SEQ ID NO: 33049 - DNA, 166 bp, Aspidoscelis tigris; identical to SEQ ID NO: 20682
  source 1..166: mol_type = genomic DNA

SEQ ID NO: 33050 - DNA, 288 bp, Mauremys mutica; identical to SEQ ID NO: 20706
  source 1..288: mol_type = genomic DNA

SEQ ID NO: 33051 - DNA, 120 bp, Mauremys mutica; identical to SEQ ID NO: 20683
  source 1..120: mol_type = genomic DNA

SEQ ID NO: 33052 - DNA, 149 bp, Xiphophorus hellerii; identical to SEQ ID NO: 20701
  source 1..149: mol_type = genomic DNA

SEQ ID NO: 33053 - DNA, 150 bp, Gambusia affinis; identical to SEQ ID NO: 20702
  source 1..150: mol_type = genomic DNA

SEQ ID NO: 33054 - DNA, 154 bp, Schizopygopsis malacanthus; identical to SEQ ID NO: 20698
  source 1..154: mol_type = genomic DNA

SEQ ID NO: 33055 - DNA, 279 bp, Schizopygopsis pylzovi; identical to SEQ ID NO: 20700
  source 1..279: mol_type = genomic DNA

SEQ ID NO: 33056 - DNA, 150 bp, Schizopygopsis pylzovi; identical to SEQ ID NO: 20703
  source 1..150: mol_type = genomic DNA

SEQ ID NO: 33057 - DNA, 1234 bp, Gila orcuttii; identical to SEQ ID NO: 20705
  source 1..1234: mol_type = genomic DNA

SEQ ID NO: 33058 - DNA, 234 bp, Ahaetulla prasina; identical to SEQ ID NO: 20707
  source 1..234: mol_type = genomic DNA

SEQ ID NO: 33059 - DNA, 261 bp, Aldabrachelys gigantea; identical to SEQ ID NO: 20711
  source 1..261: mol_type = genomic DNA

SEQ ID NO: 33060 - DNA, 149 bp, Ascidia mentula; identical to SEQ ID NO: 20620
  source 1..149: mol_type = genomic DNA

SEQ ID NO: 33061-35000 - skipped (1940 entries)

SEQ ID NO: 35001 - DNA, 378 bp, Acridotheres tristis; identical to SEQ ID NO: 20527
  source 1..378: mol_type = genomic DNA

SEQ ID NO: 35002 - DNA, 249 bp, Acrocephalus scirpaceus; identical to SEQ ID NO: 1356
  source 1..249: mol_type = genomic DNA

SEQ ID NO: 35003 - DNA, 187 bp, Agelaius tricolor; identical to SEQ ID NO: 1358
  source 1..187: mol_type = genomic DNA

SEQ ID NO: 35004 - DNA, 205 bp, Ammodramus caudacutus; identical to SEQ ID NO: 1365
  source 1..205: mol_type = genomic DNA

SEQ ID NO: 35005 - DNA, 205 bp, Ammospiza nelsoni; identical to SEQ ID NO: 1365
  source 1..205: mol_type = genomic DNA

SEQ ID NO: 35006 - DNA, 133 bp, Buteo platypterus; identical to SEQ ID NO: 20546
  source 1..133: mol_type = genomic DNA

SEQ ID NO: 35007 - DNA, 112 bp, Chamaetylas choloensis; identical to SEQ ID NO: 20531
  source 1..112: mol_type = genomic DNA

SEQ ID NO: 35008 - DNA, 332 bp, Chamaetylas fuelleborni; identical to SEQ ID NO: 1362
  source 1..332: mol_type = genomic DNA

SEQ ID NO: 35009 - DNA, 111 bp, Cichladusa arquata; identical to SEQ ID NO: 20532
  source 1..111: mol_type = genomic DNA

SEQ ID NO: 35010 - DNA, 299 bp, Ciconia episcopus; identical to SEQ ID NO: 20519
  source 1..299: mol_type = genomic DNA

SEQ ID NO: 35011 - DNA, 311 bp, Colaptes auratus; identical to SEQ ID NO: 20548
  source 1..311: mol_type = genomic DNA

SEQ ID NO: 35012 - DNA, 324 bp, Cossypha archeri; identical to SEQ ID NO: 20535
  source 1..324: mol_type = genomic DNA

SEQ ID NO: 35013 - DNA, 331 bp, Cossypha dichroa; identical to SEQ ID NO: 1360
  source 1..331: mol_type = genomic DNA

SEQ ID NO: 35014 - DNA, 340 bp, Falco fasciinucha; identical to SEQ ID NO: 20524
  source 1..340: mol_type = genomic DNA

SEQ ID NO: 35015 - DNA, 297 bp, Gallinago paraguaiae; identical to SEQ ID NO: 1350
  source 1..297: mol_type = genomic DNA

SEQ ID NO: 35016 - DNA, 270 bp, Garrulus glandarius; identical to SEQ ID NO: 20522
  source 1..270: mol_type = genomic DNA

SEQ ID NO: 35017 - DNA, 299 bp, Geranoaetus albicaudatus; identical to SEQ ID NO: 1342
  source 1..299: mol_type = genomic DNA

SEQ ID NO: 35018 - DNA, 299 bp, Harpyopsis novaeguineae; identical to SEQ ID NO: 1343
  source 1..299: mol_type = genomic DNA

SEQ ID NO: 35019 - DNA, 293 bp, Limnodromus scolopaceus; identical to SEQ ID NO: 1348
  source 1..293: mol_type = genomic DNA

SEQ ID NO: 35020 - DNA, 299 bp, Melierax canorus; identical to SEQ ID NO: 1341
  source 1..299: mol_type = genomic DNA

SEQ ID NO: 35021 - DNA, 329 bp, Myiozetetes cayanensis; identical to SEQ ID NO: 20533
  source 1..329: mol_type = genomic DNA

SEQ ID NO: 35022 - DNA, 305 bp, Otis tarda; identical to SEQ ID NO: 1865
  source 1..305: mol_type = genomic DNA

SEQ ID NO: 35023 - DNA, 339 bp, Prinia subflava; identical to SEQ ID NO: 20534
  source 1..339: mol_type = genomic DNA

SEQ ID NO: 35024 - DNA, 192 bp, Serinus canaria; identical to SEQ ID NO: 1363
  source 1..192: mol_type = genomic DNA

SEQ ID NO: 35025 - DNA, 321 bp, Aphelocoma californica; identical to SEQ ID NO: 20500
  source 1..321: mol_type = genomic DNA

SEQ ID NO: 35026 - DNA, 221 bp, Oenanthe melanoleuca; identical to SEQ ID NO: 1355
  source 1..221: mol_type = genomic DNA

SEQ ID NO: 35027 - DNA, 503 bp, Phylloscopus trochilus; identical to SEQ ID NO: 1366
  source 1..503: mol_type = genomic DNA

SEQ ID NO: 35028 - DNA, 302 bp, Geothlypis trichas; identical to SEQ ID NO: 20509
  source 1..302: mol_type = genomic DNA

SEQ ID NO: 35029 - DNA, 298 bp, Xenus cinereus; identical to SEQ ID NO: 1351
  source 1..298: mol_type = genomic DNA

SEQ ID NO: 35030 - DNA, 270 bp, Aphelocoma californica; identical to SEQ ID NO: 20528
  source 1..270: mol_type = genomic DNA

SEQ ID NO: 35031 - DNA, 332 bp, Cichladusa arquata; identical to SEQ ID NO: 1361
  source 1..332: mol_type = genomic DNA

SEQ ID NO: 35032 - DNA, 295 bp, Scolopax minor; identical to SEQ ID NO: 1349
  source 1..295: mol_type = genomic DNA

SEQ ID NO: 35033 - DNA, 298 bp, Tyto alba; identical to SEQ ID NO: 20545
  source 1..298: mol_type = genomic DNA

SEQ ID NO: 35034 - DNA, 931 bp, Acrocera orbiculus; identical to SEQ ID NO: 1871
  source 1..931: mol_type = genomic DNA

SEQ ID NO: 35035 - DNA, 258 bp, Drosophila sulfurigaster; identical to SEQ ID NO: 20566
  source 1..258: mol_type = genomic DNA

SEQ ID NO: 35036 - DNA, 1277 bp, Rhopalosiphum padi; identical to SEQ ID NO: 1872
  source 1..1277: mol_type = genomic DNA

SEQ ID NO: 35037 - DNA, 568 bp, Nemotelus nigrinus; identical to SEQ ID NO: 20568
  source 1..568: mol_type = genomic DNA

SEQ ID NO: 35038 - DNA, 190 bp, Chlorops oryzae; identical to SEQ ID NO: 20570
  source 1..190: mol_type = genomic DNA

SEQ ID NO: 35039 - DNA, 844 bp, Andrena bucephala; identical to SEQ ID NO: 20571
  source 1..844: mol_type = genomic DNA

SEQ ID NO: 35040 - DNA, 64 bp, Ascidia mentula; identical to SEQ ID NO: 20517
  source 1..64: mol_type = genomic DNA

SEQ ID NO: 35041 - DNA, 200 bp, Crotalus oreganus; identical to SEQ ID NO: 20513
  source 1..200: mol_type = genomic DNA

SEQ ID NO: 35042 - DNA, 188 bp, Gopherus flavomarginatus; identical to SEQ ID NO: 20514
  source 1..188: mol_type = genomic DNA

SEQ ID NO: 35043 - DNA, 207 bp, Malaclemys terrapin; identical to SEQ ID NO: 20515
  source 1..207: mol_type = genomic DNA

SEQ ID NO: 35044 - DNA, 186 bp, Eublepharis macularius; identical to SEQ ID NO: 20597
  source 1..186: mol_type = genomic DNA

SEQ ID NO: 35045 - DNA, 185 bp, Emys orbicularis; identical to SEQ ID NO: 20549
  source 1..185: mol_type = genomic DNA

SEQ ID NO: 35046 - DNA, 187 bp, Caretta caretta; identical to SEQ ID NO: 20551
  source 1..187: mol_type = genomic DNA

SEQ ID NO: 35047 - DNA, 119 bp, Pleurodeles waltl; identical to SEQ ID NO: 20552
  source 1..119: mol_type = genomic DNA

SEQ ID NO: 35048 - DNA, 120 bp, Aspidoscelis tigris; identical to SEQ ID NO: 20573
  source 1..120: mol_type = genomic DNA

SEQ ID NO: 35049 - DNA, 51 bp, Aspidoscelis tigris; identical to SEQ ID NO: 20574
  source 1..51: mol_type = genomic DNA

SEQ ID NO: 35050 - DNA, 495 bp, Mauremys mutica; identical to SEQ ID NO: 20599
  source 1..495: mol_type = genomic DNA

SEQ ID NO: 35051 - DNA, 187 bp, Mauremys mutica; identical to SEQ ID NO: 20575
  source 1..187: mol_type = genomic DNA

SEQ ID NO: 35052 - DNA, 270 bp, Xiphophorus hellerii; identical to SEQ ID NO: 20593
  source 1..270: mol_type = genomic DNA

SEQ ID NO: 35053 - DNA, 209 bp, Gambusia affinis; identical to SEQ ID NO: 20595
  source 1..209: mol_type = genomic DNA

SEQ ID NO: 35054 - DNA, 93 bp, Schizopygopsis malacanthus; identical to SEQ ID NO: 20591
  source 1..93: mol_type = genomic DNA

SEQ ID NO: 35055 - DNA, 93 bp, Schizopygopsis pylzovi; identical to SEQ ID NO: 20591
  source 1..93: mol_type = genomic DNA

SEQ ID NO: 35056 - DNA, 99 bp, Schizopygopsis pylzovi; identical to SEQ ID NO: 20596
  source 1..99: mol_type = genomic DNA

SEQ ID NO: 35057 - DNA, 64 bp, Gila orcuttii; identical to SEQ ID NO: 20598
  source 1..64: mol_type = genomic DNA

SEQ ID NO: 35058 - DNA, 23 bp, Ahaetulla prasina
  source 1..23: mol_type = genomic DNA
gtgatataggacaatagtcatag

SEQ ID NO: 35059 - DNA, 257 bp, Aldabrachelys gigantea; identical to SEQ ID NO: 20604
  source 1..257: mol_type = genomic DNA

SEQ ID NO: 35060 - DNA, 214 bp, Ascidia mentula; identical to SEQ ID NO: 20512
  source 1..214: mol_type = genomic DNA
